(19) United States
(12) Patent Application Publication
(10) Pub. No.: US 2025/0012808 A1
(43) Pub. Date: Jan. 9, 2025

(54) PARALLEL ANTIBODY ENGINEERING COMPOSITIONS AND METHODS

(71) Applicants: The Broad Institute, Inc., Cambridge, MA (US); The General Hospital Corporation, Boston, MA (US)

(72) Inventors: Nir Hacohen, Cambridge, MA (US); Xun Chen, Cambridge, MA (US)

(73) Assignees: The Broad Institute, Inc., Cambridge, MA (US); The General Hospital Corporation, Boston, MA (US)

(21) Appl. No.: 18/750,005

(22) Filed: Jun. 21, 2024

Related U.S. Application Data
(63) Continuation of application No. PCT/US2022/082362, filed on Dec. 23, 2022.
(60) Provisional application No. 63/293,580, filed on Dec. 23, 2021.

(51) Int. Cl. G01N 33/68

(52) U.S. Cl. CPC G01N 33/6854

(57) ABSTRACT

The present invention discloses high-throughput methods for the creation of antibodies or antigen-binding fragments that can bind to single or multiple targets. Also disclosed are methods for using one or more antibodies or antigen-binding fragments to detect cognate binding partners in various types of samples.

### RELATED APPLICATIONS

[0001] The application claims the benefit under 35 U.S.C. 119 (e) of U.S. Provisional Application No. 63/293,580 filed Dec. 23, 2021, which is incorporated by reference in its entirety.

### BACKGROUND

[0002] The development of scalable, cost-effective antibody libraries for detecting proteins (or other molecules) has greatly lagged the development of methods for detecting specific RNA or DNA sequences, for example by hybridization or sequencing. Current applications that require antibody libraries rely on laborious and expensive barcoding of individual antibodies, followed by pooling for parallel detection. There remains a need for large-scale production of antibody libraries against multiple (e.g., hundreds to thousands) of human protein targets simultaneously

### SUMMARY

[0003] The present disclosure provides cell-free platforms that use distinct antibodies or antigen binding fragments (e.g., nanobodies with, for instance, >1011 complexity) to perform parallel selection for antibodies or antigen binding fragments that bind each of up to hundreds (to thousands) of cell surface proteins (e.g., a many-to-many screen). In some embodiments, the antibodies or antigen binding fragments are naturally barcoded with their encoding RNA by ribosome display, as disclosed in PCT/US2021/051925, which claims priority to U.S. Application Nos. 63/083,073 and 63/221,663, all three of which are incorporated by reference herein in their entirety.

[0004] The antibody or antigen binding fragment libraries disclosed herein can be engineered against diverse targets and large-scale libraries of barcoded antibodies that could be detected by nucleic acid hybridization or sequencing. These antibody or antigen binding fragment libraries could be used with many applications, including but not limited to high-dimensional cell cytometry (similar to CITE-seq, PMID: 28759029, PMID: 33649592), spatially indexed sequencing (e.g., using Slide-seq), in situ sequencing to detect antibodies bound to targets (similar to CODEX), and targeted proteomics (such as the Olink proximity extension assay).

[0005] Accordingly, some aspects of the disclosure provide a novel strategy to discover and engineer synthetic antibodies or antigen binding fragments, such as single variable domain on a heavy chain (VHH) nanobodies against hundreds to thousands of human protein targets simultaneously, which, according to some aspects provide a large collection of sequence-defined antibodies and enabling rapid synthesis of pools of barcoded-antibodies at large scale.

[0006] Also disclosed herein are embodiments wherein specific binders are identified by incubating antibodies or antigen binding fragments (e.g., RNA-barcoded nanobodies) with cells expressing a library of clustered regularly interspaced short palindromic repeats (CRISPR)/Cas9 single guide RNAs (sgRNAs) targeting genes, for instance, encoding proteins (e.g., cell surface proteins). Single-cell sequencing of antibody or antigen binding fragment (e.g., nanobody) sequences and sgRNA barcodes allows identification of sgRNAs associated with reduced binding of specific antibodies or antigen binding fragments (e.g., nanobodies), and thus map antibodies or antigen binding fragments (e.g., nanobodies) to proteins (e.g., cell surface proteins). The analysis of many targets at once systematically measures off-target binding for each antibody or antigen binding fragment (e.g., nanobody). The resulting library of surface-protein-binding antibodies or antigen binding fragments (e.g., nanobodies) enable single cell and spatial tissue proteomics. Building on the principle, the platform enables the development of detection (and perturbation) reagents against conventional and unconventional targets across many platforms.

[0007] In some embodiments, the methods for the identification of respective binding partners for a plurality of unique cognate antibodies or cognate antigen binding fragments thereof comprise:
[0008] (a) introducing into a population of cells a plurality of nucleic acids encoding a plurality of binding partners, which result in expression of a plurality of unique binding partners on the surface of the cells;
[0009] (b) incubating the cells obtained in step (a) with the plurality of unique antibodies or antigen binding fragments thereof under conditions that allow for binding to the plurality of unique binding partners; and
   wherein the plurality of unique cognate antibodies or cognate antigen binding fragments thereof is matched to their respective cognate binding partner if their binding to a cell in which the cognate binding partner is introduced is higher as compared to the binding to a cell in which the nucleic acid encoding the cognate binding partner was not expressed or expressed at a lower level.

[0010] In some embodiments, the cognate binding partner that binds its cognate antibody or cognate antigen binding fragment thereof is determined by compartmentalization of the nucleic acid encoding the cognate binding partners and the nucleic acid encoding the cognate antibody or cognate antigen binding fragment thereof. In other embodiments, the cognate binding partner that binds its cognate antibody or cognate antigen binding fragment thereof is determined by sequencing of the nucleic acid encoding the cognate binding partners and the nucleic acid encoding the cognate antibody or cognate antigen binding fragment thereof. In other embodiments, the sequencing is achieved by single-cell sequencing.

[0011] In some embodiments, the methods for the identification of respective binding partners for a plurality of unique cognate antibodies or cognate antigen binding fragments thereof comprise:
[0012] (a) providing a population of cells that express one or more cognate binding partners;
[0013] (b) disrupting and/or decreasing the expression of one or more cognate binding partners in one or more cells of the population; and
[0014] (c) incubating the population of cells in step (b) with a plurality of unique antibodies or antigen binding fragments thereof under conditions that allow for the binding of cognate antibodies or cognate antigen binding fragments thereof to their respective cognate binding partner;
[0015] (d) determining which cognate antibodies or cognate antigen binding fragments thereof did not bind or had decreased binding to one or more cells of the population with disrupted and/or decreased cognate binding partner expression,
   wherein the respective cognate binding partners for the plurality of cognate antibodies or cognate antigen binding fragments thereof is identified when the cognate antibodies or cognate antigen binding fragments thereof is determined to have not bound or had lower binding to the cell in which the cognate binding partner is disrupted and/or decreased.

[0016] In some embodiments, the expression of the one or more cognate binding partners is disrupted and/or decreased using a clustered regularly interspaced short palindromic repeats (CRISPR)-based system. In other embodiments, the one or more cells in which the expression of one or more cognate binding partners is disrupted and/or decreased also express a gene editing nuclease. In other embodiments, the gene editing nuclease is an endonuclease. In other embodiments, the gene editing nuclease is Cas9.

[0017] In some embodiments, the expression of one or more cognate binding partners is disrupted and/or decreased by contacting the population of cells with a ribonucleic acid that is a single-guide RNA (sgRNA). In other embodiments, the expression of the one or more cognate binding partners is disrupted and/or decreased using RNA interference (RNAi). In other embodiments, the expression of the one or more cognate binding partners is disrupted and/or decreased by contacting the population of cells cell with a ribonucleic acid which is either a small interfering RNA (siRNA) or a short hairpin RNA (shRNA), thereby introducing the ribonucleic acid into individual cells and knocking-down the expression of the cognate binding partner that is the target of the ribonucleic acid in the cells in which the ribonucleic acid was introduced. In other embodiments, the cognate antibodies or cognate antigen binding fragments thereof are linked to nucleic acids containing their respective coding sequences or fragment thereof. In other embodiments, the cognate antibodies or cognate antigen binding fragments thereof are linked to nucleic acids containing their respective coding sequences or fragment thereof using the ribonucleic acid. In other embodiments, the ribonucleic acid responsible for disrupting and/or decreasing the cognate binding partner and the nucleic acid encoding the cognate antibody or cognate antibody binding fragment thereof is determined by compartmentalization of the nucleic acid encoding the cognate binding partners and the nucleic acid encoding the cognate antibody or cognate antigen binding fragment thereof. In other embodiments, the ribonucleic acid responsible for disrupting and/or decreasing the cognate binding partner and the nucleic acid encoding the cognate antibody or cognate antibody binding fragment thereof is determined by sequencing of the nucleic acid encoding the cognate binding partners and the nucleic acid encoding the cognate antibody or cognate antigen binding fragment thereof. In other embodiments, the sequencing is achieved by single-cell sequencing.

[0018] In some embodiments, the ribonucleic acid responsible for disrupting and/or decreasing the cognate binding partner is used to identify the cognate binding partner with disrupted expression in the cell. In other embodiments, the population of cells is contacted with a plurality of sgRNAs or shRNAs at a multiplicity of infection (MOI) less than 1. In other embodiments, the MOI is 0.2, 0.3, 0.4, 0.5, 0.6, 0.7, 0.8, or 0.9. In other embodiments, the plurality of sgRNAs or shRNAs is introduced into the population of cells using lentiviral transduction. In other embodiments, the plurality of sgRNAs or shRNAs is introduced into the population of cells using transformation, transfection, or electroporation. In other embodiments, the plurality of sgRNAs or shRNAs comprises 2 to 100,000 different ribonucleic acids encoding different sgRNAs or shRNAs that target expression of different genes encoding different binding partners.

[0019] In some embodiments, the antibodies or antigen binding fragments thereof are associated with the nucleic acids encoding their respective coding sequences. In other embodiments, the association of the antibodies or antigen binding fragments thereof to the nucleic acids encoding their respective coding sequences is achieved using ribosome display complexes comprising the antibodies or antigen binding fragments thereof linked to the nucleic acids encoding their coding sequences and ribosomes. In other embodiments, the nucleic acids encoding the antibody or antigen binding fragment thereof coding sequence are RNA. In other embodiments, the ribosomes are from eukaryotic cells. In other embodiments, the ribosomes are from prokaryotic cells.

[0020] In some embodiments, the respective cognate binding partners are proteins. In other embodiments, the cognate antibody or cognate antigen binding fragment thereof that bind a cognate binding partner are clustered computationally. In other embodiments, a cluster size of a cognate antibody or cognate antigen binding fragment thereof cluster is assessed by counting the number of sequences in the cluster. In other embodiments, higher or lower binding of the cognate antibody or cognate antigen binding fragment thereof to a cognate binding partner is determined by a larger or smaller cluster size of the cluster representing the cognate antibody or cognate antigen binding fragment thereof. In other embodiments, the cluster is normalized relative to the total sequence number to obtain a relative cluster size.

[0021] In other embodiments, a specificity value is calculated for a cluster of cognate antibody or cognate antigen binding fragment by calculating the fraction of cluster members associated with each binding partners among a plurality of binding partners and finding the largest value. In other embodiments, an affinity value is calculated for a cluster of cognate antibody or cognate antigen binding fragment for a binding partner by calculating the count of cluster members associated with the binding partner. In other embodiments, the ranking of the performance of a plurality of cognate antibody or cognate antigen binding fragment is obtained by ranking their cluster size and/or specificity value and/or affinity value. In other embodiments, the performance metrics of a cognate antibody or cognate antigen binding fragment is obtained by obtaining their cluster size and/or specificity value and/or affinity value.

[0022] In some embodiments, the methods for obtaining a plurality of unique cognate antibodies or cognate antigen binding fragments thereof that bind to their respective cognate binding partner present on a surface comprising:
[0023] (a) incubating a plurality of unique antibodies or antigen binding fragments thereof with one or more binding partners bound to the surface under conditions that allow for binding of the antibodies or antigen binding fragments thereof to their respective cognate binding partner;
[0024] (b) collecting a plurality of antibodies or antigen binding fragments thereof that had bound to their respective cognate binding partner;

[0025] wherein the plurality of unique cognate antibodies or cognate antigen binding fragments thereof that bind to their respective cognate binding partner are obtained.

[0026] In some embodiments, the surface is the surface of one or more target cells. In other embodiments, the plurality of unique antibodies or antigen binding fragments thereof of step (a) is obtained by:
[0027] (aa) incubating a preliminary plurality of unique antibodies or antigen binding fragments thereof with a non-target surface under conditions that allow for the binding of antibodies or antigen binding fragments thereof to the non-target surface;
[0028] (bb) collecting the antibodies or antigen binding fragments thereof that did not bind to the non-target surface in step (aa), wherein the plurality of unique antibodies or antigen binding fragments thereof of step (a) is obtained.

[0029] In some embodiments, the non-target surface is the surface of one or more non-target cells. In other embodiments, the non-target cells do not express, or express at lower levels as compared to the one or more target cells of, the cognate binding partners. In other embodiments, the one or more target cells comprise cells in suspension or attached to a substrate. In other embodiments, the one or more target cells are fixed using a fixation reagent. In other embodiments, the fixation reagent is formaldehyde.

[0030] In some embodiments, the one or more target cells are one or more of a T cell population, a kidney cell population, or a bone marrow cell population. In other embodiments, the one or more target cells comprise blood cells. In other embodiments, the one or more target cells comprise cancer cells. In other embodiments, the one or more target cells comprise leukemia cells or neuroblastoma cells. In other embodiments the one or more target cells comprise leukemic T-cell lymphoblasts. In other embodiments, the one or more target cells comprise Jurkat cells, HEK-293 cells, SH-SY5Y cells, or CHO cells. In other embodiments, the one or more target cells are cultured for 1 day to 14 days prior to step (a).

[0031] In some embodiments, the non-target cells are phylogenetically distant from the one or more target cells. In other embodiments, the non-target cells and the one or more target cells are from different organs or different species. In other embodiments, the plurality of antibodies or antigen binding fragments thereof of step (b) comprises the steps of (1) incubating the surface in a buffer comprising chelating agents, (2) fractionating the incubated surface and buffer, thereby producing a supernatant that does not comprise the surface, and (3) retaining the supernatant after the fractionation of step (2). In other embodiments, the chelating agent is EDTA or EGTA. In other embodiments, the one or more target cells express one or more cancer driver genes and/or genes carrying cancer driver mutations, and the cognate binding partners are expressed by at least one of the one or more target cells and are induced by the cancer driver genes and/or genes carrying cancer driver mutations.

[0032] In some embodiments, the cognate binding partner proteins are natively expressed proteins. In other embodiments, the cognate binding partner proteins are expressed by the one or more target cells by introducing nucleic acids containing the coding nucleic acid sequences for the cognate binding partner proteins into the cells. In other embodiments, the respective cognate binding partner proteins have post-translational modifications. In other embodiments, the respective cognate binding partner protein is part of a protein complex. In other embodiments, the respective cognate binding partners comprise a lipid group or a sugar group. In other embodiments, the respective cognate binding partners are not proteins. In other embodiments, the respective cognate binding partners are lipids or sugars. In other embodiments, the respective cognate binding partners are from a mammal. In other embodiments, the respective cognate binding partners are from a mouse. In other embodiments, the respective cognate binding partners are from a human.

[0033] In some embodiments, the respective cognate binding partner is a cell surface protein. In other embodiments, the respective cognate binding partners are membrane proteins or membrane protein domains, intracellular proteins or intracellular protein domains, cytosolic proteins or cytosolic protein domains, or nuclear proteins or nuclear protein domains. In other embodiments, the respective cognate binding partners are peptides. In other embodiments, the peptides are 2 amino acids to 30 amino acids in length. In other embodiments, the peptides are part of a peptide-carrier protein fusion. In other embodiments, the respective cognate binding partner comprises a complex of a peptide loaded onto a major histocompatibility complex protein. In other embodiments, the respective cognate binding partners are proteins that mediate cell-to-cell interactions. In other embodiments, the respective cognate binding partners are proteins that are overexpressed in cancer cells or tumor cells. In other embodiments, the respective cognate binding partner is an ecto-nucleoside triphosphate diphosphohydrolase 1, E-NTPDasel (CD39), a T cell immunoglobulin and mucin domain-3 (Tim3), a cluster of differentiation 28 (CD28), a cluster of differentiation 4 (CD4), and/or a stimulator of interferon gene (STING).

[0034] In some embodiments, the cognate antibody or cognate antigen binding fragment thereof has an affinity for its respective cognate binding partner of a K_{D} of less than 10 μM. In other embodiments, the respective cognate binding partners are cancer drug targets or a cancer immunotherapy targets.

[0035] In some embodiments, the methods for the detection of respective cognate binding partners in a sample comprise:
[0036] (a) incubating a sample comprising a population of cells expressing cognate binding partners with a plurality of ribosome display complexes, wherein the ribosome display complexes comprise:
   [0037] (1) a plurality of unique antibodies or antigen binding fragments thereof,
   [0038] (2) nucleic acids encoding the plurality of unique antibodies or antigen binding fragments thereof, and
   [0039] (3) ribosomes, under conditions that allow for binding of the plurality of the antibodies or antigen binding fragments thereof to their respective cognate binding partners expressed by the cells of the sample;
[0040] (b) detecting the ribosome display complexes that bound to their cognate binding partners in the sample; and
[0041] (c) quantifying the cognate antibodies or cognate antigen binding fragments thereof bound to their cognate binding partners expressed by the cells of the sample, thereby detecting the respective cognate binding partners in the sample.

[0042] In some embodiments, at least one nucleic acid encoding an antibody or antigen binding fragment thereof comprises a unique barcode in the open reading frame (ORF). In other embodiments, the sample is selected from the group consisting of single cells, tissue slices, organs, and organisms. In other embodiments, In other embodiments, step (c) further comprises sequencing one or more of the barcodes. In other embodiments, the barcodes are the nucleic acid sequence of CDR1, CDR2, or CDR3 of the cognate antibodies or antigen binding fragments thereof. In other embodiments, step (b) is achieved by using secondary antibodies. In other embodiments, step (b) is achieved by fluorescence in situ hybridization.

[0043] In some embodiments, a plurality of nucleic acids encoding the antibodies or antigen binding fragments thereof is used to determine a surface proteome of a cell. In other embodiments, the surface is one or more target cells, and wherein a surface proteome of a cell is determined using flow cytometry, imaging, proteomic analysis, or functional analysis. In other embodiments, the surface proteome of a cell in the cell population is determined using flow cytometry, imaging, proteomic analysis, or functional analysis. In other embodiments, includes sequencing a plurality of nucleic acids encoding the antibodies or antigen binding fragments thereof, clustering the nucleic acid sequences computationally, synthesizing one or more sequences from one or more clusters of antibodies or antigen binding fragments thereof for cloning of the respective genes, and testing the respective antibodies or antigen binding fragments thereof.

[0044] In some embodiments, the cognate antibodies or cognate antigen binding fragments thereof are allowed to bind to their respective cognate binding partners in the presence of ribonuclease inhibitors. In other embodiments, the ribonuclease inhibitor is a protein or a small molecule. In other embodiments, the ribonuclease inhibitor is Ribonucleoside Vanadyl Complex.

[0045] In other embodiments, the antibodies or antigen binding fragments thereof are nanobodies. In other embodiments, the antibodies or antigen binding fragments thereof are a variable domain of the heavy chain (VHH). In other embodiments, the antibodies or antigen binding fragments thereof are modified to alter stability, aggregation propensity, in vivo half-life, neutralizing activity and/or dimerization. In other embodiments, the antibodies or antigen binding fragments thereof are fusion proteins. In other embodiments, the antibodies or antigen binding fragments thereof are fused to another antibody or antibody fragment thereof, Fc domain, antigen binding domain, glutathione S-transferase (GST), small molecule, and/or serum albumin. In other embodiments, the respective cognate binding partner is an antigen.

[0046] In some embodiments, the composition comprises a cognate antibody or cognate antigen binding fragment thereof associated with a respective cognate binding partner, a target cell, and a nucleic acid inside the target cell encoding, or interfering the expression of, the respective cognate binding partner. In other embodiments, the target cell is a T cell, a kidney cell, or a bone marrow cell. In other embodiments, the target cell is a blood cell. In other embodiments, the target cell is a cancer cell. In other embodiments, the target cell is a leukemia cell or a neuroblastoma cell. In other embodiments, the target cell is a leukemic T-cell lymphoblast. In other embodiments, the target cell is a Jurkat cell, a HEK-293, an SH-SY5Y cell, or a CHO cell.

[0047] In some embodiments, the respective cognate binding partner is a cancer drug target. In other embodiments, the respective cognate binding partner is a protein or a protein domain. In other embodiments, the protein or protein domain has a post-translational modification. In other embodiments, the respective cognate binding partner is part of a protein complex. In other embodiments, the respective cognate binding partner comprises a lipid group or a sugar group.

[0048] In some embodiments, the respective cognate binding partner is not a protein. In other embodiments, the respective cognate binding partner is a lipid. In other embodiments, the respective cognate binding partner is a sugar. In other embodiments, the respective cognate binding partner is from a mammal. In other embodiments, the respective cognate binding partner is from a mouse. In other embodiments, the respective cognate binding partner is from a human.

[0049] In some embodiments, the respective cognate binding partner comprises a cell surface protein. In other embodiments, the respective cognate binding partner comprises a membrane protein or membrane protein domain. In other embodiments, the respective cognate binding partner comprises an intracellular protein. In other embodiments, the respective cognate binding partner comprises is a cytosolic protein. In other embodiments, the respective cognate binding partner comprises a nuclear protein. In other embodiments, the respective cognate binding partner comprises a peptide. In other embodiments, the respective cognate binding partner comprises a complex of a peptide loaded onto a major histocompatibility complex protein.

### BRIEF DESCRIPTION OF THE DRAWINGS

[0050] The following drawings form part of the present specification and are included to further demonstrate certain aspects of the present disclosure, which can be better understood by reference to one or more of these drawings in combination with the detailed description of specific embodiments presented herein.

[0051] FIGS. 1A-1C are schematics of massively parallel nanobody generation and nanobody-target mapping by ORF expression. A three-stage process to generate nanobodies to multiple (one to thousands) selected protein domains (targets). FIG. 1A shows the targets expressed as artificial cell membrane proteins. FIG. 1B shows nanobodies against any of the selected targets are selected by pooled selection which yields an output DNA library encoding nanobodies that can bind one of the selected targets. FIG. 1C Nanobody-target mapping: the target of each nanobodies in the output DNA library is found by single cell sequencing.

[0052] FIGS. 2A-2C are schematics showing massively parallel nanobody generation and nanobody-target mapping by Knock-out-Drop-out. FIG. 2A shows a cell line is chosen that expresses native surface protein of interest (target cell). Another cell line of different origin is used for pre-clearing (a non-target cell). A lentivirus library is built that can knock out surface proteins on the target cells. FIG. 2B shows nanobodies against any of the surface proteins on the target cells are selected by pooled selection which yields an output DNA library encoding nanobodies that can bind one of the surface proteins. FIG. 2C Nanobody-target mapping: the target of each nanobodies in the output DNA library is found by single cell sequencing.

[0053] FIG. 3 is a schematic for sequencing the NGS sequencing library in nanobody-target mapping. Four reads are performed that covers CDR1, CDR2, CDR3 and the single cell barcode. The full-length sequence is obtained by filling in with the constant frame region sequences.

[0054] FIG. 4 is a schematic of using ribosome display complex pools as highly multiplex protein profiling reagents. A large library of nanobodies with known targets can be displayed by ribosome display. The resulting solution can be used to profile protein levels by quantifying nanobody RNA sequences/barcodes using high-throughput sequencing.

[0055] FIGS. 5A-5B is a schematic of using whole cells to present antigen on the cell surface for nanobody selection. FIG. 5A. Using EGFP as an example, a protein can be expressed as an artificial cell surface protein by adding a N-terminal signal peptide and a C-terminal GPI anchor sequence. FIG. 5B. Whole cells can act as solid surfaces for presenting antigen for selection of nanobody ribosome display complex, the receptor binding domain (RBD) of SARS-COV-2 spike protein and RBD nanobodies are used to test feasibility, EGFP is used as negative control.

[0056] FIGS. 6A-6F shows a method for cell-free nanobody engineering. FIG. 6A. is a schematic of the structure of the linear DNA library. FIG. 6B. is a schematic of in vitro translation of the DNA library yielding RNA-ribosome-nanobody complexes. FIG. 6C. is a schematic of a library of such complexes that is iteratively applied to immobilized targets on solid surfaces to enrich for binder sequences in the output library. FIG. 6D. is a schematic of full-length sequencing and computational clustering of the output library providing a comprehensive list of nanobody clusters; each cluster represent one nanobody. FIG. 6E. is a schematic that shows the selection against SARS-COV-2 RBD generates hundreds of nanobody clusters; and FIG. 6F. is a graph showing potent neutralizing nanobodies.

[0057] FIG. 7 is a schematic for an integrated VHH antibody discovery platform comprising four parts. FIG. 7 (top left) shows a synthetic universal VHH (also known as nanobody) library with randomized CDR regions, the library molecules are linear DNA and contain 5 prime and 3 prime sequence elements required for ribosome display. FIG. 7 (top right) shows genotype-phenotype complexes formed by ribosome display of the synthetic universal VHH library. FIG. 7 (bottom left) shows selection for binders to immobilized target antigen from the genotype-phenotype complexes, yielding an output library composed of DNA encoding VHH binders. FIG. 7 (bottom right) shows binder discovery from the selection output library using high-throughput sequencing and CDR-directed clustering.

[0058] FIG. 8 is a schematic for parallel antibody discovery approaches that use massively parallel antibody discovery achieved by pooled antibody selection followed by antibody-antigen mapping. FIG. 8 (top) shows pooled antibody selection performed using antibody selection against a pool of antigens to recover a pool of DNA molecules encoding binders. FIG. 8 (bottom) shows antibody-antigen mapping that maps antibodies recovered by pooled antibody selection to their cognate antigen in a high-throughput manner.

[0059] FIG. 9 shows quantitative detection of nucleic acid sequences of bound VHH on cells and antigens expressed by the cells. Equal amounts of ribosome display complexes of four VHHs were incubated with a mixture of cells with each cell expressing either the receptor binding domain of SARS-COV-2 spike (RBD) or EGFP on the cell surface. The cells with bound ribosome display complexes were then compartmentalized and sequenced by droplet-based single cell sequencing to quantify the unique molecular identifier (UMI) of VHH and antigen nucleic acid sequences. Compartments containing RBD expressing cells were enriched with anti-RBD VHHs (top), and compartments containing EGFP expressing cells (bottom) were enriched with anti-EGFP VHHs, while compartment containing both RBD and EGFP cells (middle) showed a more even mixture of anti-RBD and anti-EGFP VHHs.

[0060] FIGS. 10A-10B show antibody-antigen mapping using anti-RBD VHHs as positive controls. Equal amount of DNA encoding SR1 (FIG. 10A) or SR6v7 (FIG. 10B), two VHHs that bind RBD, were included as input for ribosome display, the formed ribosome display complexes were incubated with cells expressing different antigens (x axis) on the cell surface. The cells were then sequenced by droplet-based single cell sequencing to quantify the unique molecular identifier (UMI) of VHH sequences (count) and antigen sequences to determine antigen identity. The cell number normalized fraction of each VHH on cells expressing each antigen were calculated (y axis). The anti-RBD VHHs are enriched on cells expressing RBD. The count per RBD cell value of a VHH correlates with the VHH's affinity. The cell number normalized fraction of a VHH on cells expressing the VHH's cognate antigen correlates with the VHH's specificity.

[0061] FIG. 11 shows the mapping of VHHs recovered from a pooled selection against a pool of antigens to their cognate antigen. Pooled VHH selection was performed against a pool of antigens (y axis, except RBD which is not included during selection). The cell number normalized fraction of each VHH cluster (x axis) on cells expressing each antigen were calculated (marker size). The specificity values are the highest fraction among all antigens for each VHH cluster. As such, the specificity value describes the specificity of an antibody towards a collection of antigens. The specificity value is measured by incubating a defined amount of the antibody with the collection of antigens in defined amounts under a defined condition and finding the percentage of antibodies bound to each antigen, the highest percentage value among the values for each antigen is the specificity value. SR1 and SR6v7 are previously identified anti-RBD VHHs spiked in as positive controls, VHH1-22 are representative VHH clusters recovered by the pooled selection.

### DETAILED DESCRIPTION

[0062] The aspects described herein are not limited to specific embodiments, systems, compositions, methods, or configurations, and as such can, of course, vary. The terminology used herein is for the purpose of describing particular aspects only and, unless specifically defined herein, is not intended to be limiting.

[0063] Unless defined otherwise, technical and scientific terms used herein have the same meaning as commonly understood by one of ordinary skill in the art to which this disclosure pertains. Definitions of common terms and techniques in molecular biology may be found in Molecular Cloning: A Laboratory Manual, 2^{nd} edition (1989) (Sambrook, Fritsch, and Maniatis); Molecular Cloning: A Laboratory Manual, 4^{th} edition (2012) (Green and Sambrook); Current Protocols in Molecular Biology (1987) (F. M. Ausubel et al. eds.); the series Methods in Enzymology (Academic Press, Inc.): PCR 2: A Practical Approach (1995) (M. J. MacPherson, B. D. Hames, and G. R. Taylor eds.): Antibodies, A Laboratory Manual (1988) (Harlow and Lane, eds.): Antibodies A Laboratory Manual, 2nd edition 2013 (E. A. Greenfield ed.); Animal Cell Culture (1987) (R. I. Freshney, ed.); Benjamin Lewin, Genes IX, published by Jones and Bartlet, 2008 (ISBN 0763752223); Kendrew et al. (eds.), The Encyclopedia of Molecular Biology, published by Blackwell Science Ltd., 1994 (ISBN 0632021829); Robert A. Meyers (ed.), Molecular Biology and Biotechnology: a Comprehensive Desk Reference, published by VCH Publishers, Inc., 1995 (ISBN 9780471185710); Singleton et al., Dictionary of Microbiology and Molecular Biology 2nd ed., J. Wiley & Sons (New York, N.Y. 1994), March, Advanced Organic Chemistry Reactions, Mechanisms and Structure 4th ed., John Wiley & Sons (New York, N.Y. 1992); and Marten H. Hofker and Jan van Deursen, Transgenic Mouse Methods and Protocols, 2^{nd} edition (2011).

[0064] As used herein, the singular forms “a”, “an”, and “the” include both singular and plural referents unless the context clearly dictates otherwise.

[0065] The term “optional” or “optionally” means that the subsequent described event, circumstance or substituent may or may not occur, and that the description includes instances where the event or circumstance occurs and instances where it does not.

[0066] The recitation of numerical ranges by endpoints includes all numbers and fractions subsumed within the respective ranges, as well as the recited endpoints.

[0067] The terms “about” or “approximately” as used herein when referring to a measurable value such as a parameter, an amount, a temporal duration, and the like, are meant to encompass variations of and from the specified value, such as variations of +/−10% or less, +/−5% or less, +/−1% or less, and +/−0.1% or less of and from the specified value, insofar such variations are appropriate to perform in the disclosed invention. It is to be understood that the value to which the modifier “about” or “approximately” refers is itself also specifically, and preferably, disclosed.

[0068] As used herein, a “biological sample” may contain whole cells and/or live cells and/or cell debris. The biological sample may contain (or be derived from) a “bodily fluid”. The present invention encompasses embodiments wherein the bodily fluid is selected from amniotic fluid, aqueous humour, vitreous humour, bile, blood serum, breast milk, cerebrospinal fluid, cerumen (earwax), chyle, chyme, endolymph, perilymph, exudates, feces, female ejaculate, gastric acid, gastric juice, lymph, mucus (including nasal drainage and phlegm), pericardial fluid, peritoneal fluid, pleural fluid, pus, rheum, saliva, sebum (skin oil), semen, sputum, synovial fluid, sweat, tears, urine, vaginal secretion, vomit and mixtures of one or more thereof. Biological samples include cell cultures, bodily fluids, cell cultures from bodily fluids. Bodily fluids may be obtained from a mammal organism, for example by puncture, or other collecting or sampling procedures.

[0069] The terms “subject,” “individual,” and “patient” are used interchangeably herein to refer to a vertebrate, preferably a mammal, more preferably a human. Mammals include, but are not limited to, murines, simians, humans, farm animals, sport animals, and pets. Tissues, cells and their progeny of a biological entity obtained in vivo or cultured in vitro are also encompassed.

[0070] Various embodiments are described hereinafter. It should be noted that the specific embodiments are not intended as an exhaustive description or as a limitation to the broader aspects discussed herein. One aspect described in conjunction with a particular embodiment is not necessarily limited to that embodiment and can be practiced with any other embodiment(s). Reference throughout this specification to “one embodiment”, “an embodiment,” “an example embodiment,” means that a particular feature, structure or characteristic described in connection with the embodiment is included in at least one embodiment of the present invention. Thus, appearances of the phrases “in one embodiment,” “in an embodiment,” or “an example embodiment” in various places throughout this specification are not necessarily all referring to the same embodiment, but may. Furthermore, the particular features, structures or characteristics may be combined in any suitable manner, as would be apparent to a person skilled in the art from this disclosure, in one or more embodiments. Furthermore, while some embodiments described herein include some but not other features included in other embodiments, combinations of features of different embodiments are meant to be within the scope of the invention. For example, in the appended claims, any of the claimed embodiments can be used in any combination.

[0071] All publications, published patent documents, and patent applications cited herein are hereby incorporated by reference to the same extent as though each individual publication, published patent document, or patent application was specifically and individually indicated as being incorporated by reference.

### OVERVIEW

[0072] Embodiments disclosed herein provide antibody engineering platforms for rapid isolation of large-scale number of antibodies and antigen-binding fragments thereof in which antibody or antibody binding fragments thereof (such as nanobodies) are identified as matching one more cognate binding partners, and the antibodies or antibody binding fragments thereof obtained by the platform. These large-scale number of antibody libraries will be useful for, among other reasons, detecting the cell surface proteome for cytometry, imaging, proteomic or functional studies. The engineering platform described here also provides an approach to find binders of “difficult” targets (e.g., protein complexes, post-translational modifications, non-protein targets such as sugars), and methods for producing programmable pooled libraries of barcoded nanobodies. Antibodies are widely used in research and medicine. Conventional antibody generation by immunizing animals is time-intensive and leads to variable results. A cell-free antibody engineering platform (CeVICA) has previously been described that integrates a synthetic library of camelid heavy-chain antibody VHH domains with randomized complementarity-determining regions (CDRs), optimized in vitro selection based on ribosome display and a computational pipeline for binder prediction based on CDR-directed clustering. The present disclosure, among other things, provides for the high-throughput identification of large numbers of antibody or antigen-binding fragments thereof, for example nanobodies, that bind to specific antigens, (such as, but not necessarily limited to, proteins) in a cell, such as cell surface proteins, but also with randomized complementarity-determining regions (CDRs) and optimized in vitro selection based on ribosome display and a computational pipeline for binder prediction based on CDR-directed clustering.

### Antibodies

[0073] In some embodiments, the present invention provides antibodies, antibody fragments, binding fragments of an antibody, or antigen binding fragments thereof, capable of binding to an antigen of interest. The term “antibody” is used interchangeably with the term “immunoglobulin” herein, and includes intact antibodies, fragments of antibodies, and intact antibodies and fragments that have been mutated either in their constant and/or variable region (e.g., mutations to produce chimeric, partially humanized, or fully humanized antibodies, as well as to produce antibodies with a desired trait, e.g., enhanced binding and/or reduced FcR binding). The term “fragment” refers to a part or portion of an antibody or antibody chain comprising fewer amino acid residues than an intact or complete antibody or antibody chain. Fragments can be obtained via chemical or enzymatic treatment of an intact or complete antibody or antibody chain. Fragments can also be obtained by recombinant means. Exemplary fragments include Fab, Fab′, F(ab′)₂, Fabc, Fd, dAb, VHH (nanobody), VH, VL, and scFv and/or Fv fragments.

[0074] The term “antigen binding fragment” refers to a polypeptide fragment of an immunoglobulin or antibody that binds antigen or competes with intact antibody (e.g., with the intact antibody from which they were derived) for antigen binding (e.g., specific binding). As such, these antibodies or fragments thereof are included in the scope of the invention, provided that the antibody or antigen binding fragment thereof (e.g., cognate antibody, cognate antigen binding fragment, nanobody, etc.) binds specifically to a binding partner (e.g., target molecule, cognate binding partner or respective cognate binding partner).

[0075] In some embodiments, the antibody, antibody fragment or antigen binding fragment is a therapeutic antibody or therapeutic antigen binding fragment thereof. In some embodiments, the antibody, antibody fragment or antigen binding fragment thereof is a neutralizing antibody, neutralizing antibody fragment or neutralizing antigen binding fragment.

[0076] As used herein, “neutralizing antibody” refers to an antibody, antibody fragment or antigen binding fragment thereof that is capable of neutralizing a pathogen or reducing infectivity (e.g., viral pathogen or bacterial pathogen).

[0077] As used herein “complementarity determining regions” or “CDRs” refer to variable regions in an antibody that provide for antigen specificity. In some embodiments, specific CDRs identified can be used in an antibody framework described further herein. In some embodiments, one, two, or all three CDRs are used in a framework. In some embodiments, CDR1 and CDR3 are used in a framework. In some embodiments, CDR3 is used in a framework. In preferred embodiments, all three CDRs are used in a framework. In some embodiments, the CDRs are used in a heavy-chain antibody VHH domain. As used herein, framework can refer to an entire antibody VHH domain or antibody as described herein. In some embodiments, frame region (FR) refers to the non-CDR regions or constant regions in the antibody. The frame regions in the antibodies of the present invention are also referred to as frame1, frame2, frame3 and frame4.

[0078] In some embodiments, the antibodies of the present invention are heavy chain antibodies. As used herein “heavy chain antibody,” “VHH” or “single-domain antibodies” (sdAbs) refers to an antibody which consists only of two heavy chains and lacks the two light chains usually found in antibodies (see, e.g., Henry and Mackenzie, Antigen recognition by single-domain antibodies: structural latitudes and constraints. MAbs. 2018 August-September; 10 (6): 815-826). VHH can refer to an antibody or VHH domain. Single-domain antibodies (sdAb), which can be known as nanobodies; an antibody fragment consisting of a single monomeric variable antibody domain. The ˜12-15 kDa variable domains of these antibodies (VHHs and VNARs) can be produced recombinantly and can recognize antigen in the absence of the remainder of the antibody heavy chain. In common antibodies, the antigen binding region consists of the variable domains of the heavy and light chains (VH and VL). Heavy-chain antibodies can bind antigens despite having only VH domains. In some embodiments, the heavy chain antibody is an antibody derived from cartilaginous fishes (immunoglobulin new antigen receptor (IgNAR)) or camelid ungulates. Non-limiting examples of camelids include dromedaries, camels, llamas, and alpacas.

[0079] In some embodiments, antibodies or antigen binding fragments thereof prepared according to the present invention are substantially free of non-antibody protein. As used herein, a preparation of antibody protein having less than about 50% of non-antibody protein (also referred to herein as a “contaminating protein”), or of chemical precursors, is considered to be “substantially free.” Substantially free is considered to be 40%, 30%, 20%, 10% and more preferably 5% (by dry weight), free of non-antibody protein, or of chemical precursors. When the antibody protein or biologically active portion thereof is recombinantly produced, it is also preferably substantially free of culture medium, i.e., culture medium represents less than about 30%, preferably less than about 20%, more preferably less than about 10%, and most preferably less than about 5% of the volume or mass of the protein preparation.

[0080] In preferred embodiments, the antibodies of the present invention are monoclonal antibodies. As used herein, the term “monoclonal antibody” refers to a single antibody produced by any means, such as recombinant DNA technology. As used herein, the term “monoclonal antibody” also refers to an antibody derived from a clonal population of antibody-producing cells (e.g., B lymphocytes or B cells) which is homogeneous in structure and antigen specificity. The term “polyclonal antibody” refers to a plurality of antibodies originating from different clonal populations of antibody-producing cells which are heterogeneous in their structure and epitope specificity but which recognize a common antigen. Monoclonal and polyclonal antibodies may exist within bodily fluids, as crude preparations, or may be purified, as described herein.

[0081] The term “binding portion” of an antibody (or “antibody portion”) includes one or more complete domains, e.g., a pair of complete domains, as well as fragments of an antibody that retain the ability to specifically bind to a target molecule. It has been shown that the binding function of an antibody can be performed by fragments of a full-length antibody. Binding fragments are produced by recombinant DNA techniques, or by enzymatic or chemical cleavage of intact immunoglobulins. Binding fragments include Fab, Fab′, F (ab′)₂, Fabc, Fd, dAb, Fv, single chains, VHH, single-chain antibodies, e.g., scFv, and single domain antibodies.

[0082] In some embodiments, “humanized” forms of non-human antibodies contain amino acid residues in frame regions that resemble human antibody frame regions. In some embodiments, frame regions of camelid antibodies or heavy chain antibodies are modified. In some embodiments, humanized residues can be found in any human IGHV gene. In some embodiments, the humanized residues are located in frame 2 or frame 4. In preferred embodiments, the humanized residues are located in frame 2 position 4, frame 2 position 11, frame 2 position 12, frame 2 position 14, frame 4 position 8. Humanized frames can be based on well characterized VHHs (Kirchhofer et al., 2010; Turner et al., 2014). These frames share high homology with the human IGHV3-23 or IGHJ4, but can be altered further as described herein (e.g., Frames 2 and 4).

[0083] In some embodiments, “humanized” forms of non-human antibodies are chimeric antibodies that contain minimal sequence derived from non-human immunoglobulin (e.g., camelid). For the most part, humanized antibodies are human immunoglobulins (recipient antibody) in which residues from a hypervariable region of the recipient are replaced by residues from a hypervariable region of a non-human species (donor antibody) such as mouse, rat, rabbit or nonhuman primate having the desired specificity, affinity, and capacity. In some instances, FR residues of the human immunoglobulin are replaced by corresponding non-human residues. Furthermore, humanized antibodies may comprise residues that are not found in the recipient antibody or in the donor antibody. These modifications are made to further refine antibody performance. In general, the humanized antibody will comprise substantially all of at least one, and typically two, variable domains, in which all or substantially all of the hypervariable regions correspond to those of a non-human immunoglobulin and all or substantially all of the FR regions are those of a human immunoglobulin sequence. The humanized antibody optionally also will comprise at least a portion of an immunoglobulin constant region (Fc), typically that of a human immunoglobulin.

[0084] Examples of portions of antibodies or epitope-binding proteins encompassed by the present definition include: (i) the Fab fragment, having VL, CL, VH and CH1 domains; (ii) the Fab′ fragment, which is a Fab fragment having one or more cysteine residues at the C-terminus of the CH1 domain; (iii) the Fd fragment having VH and CH1 domains; (iv) the Fd′ fragment having VH and CH1 domains and one or more cysteine residues at the C-terminus of the CH1 domain; (v) the Fv fragment having the VL and VH domains of a single arm of an antibody; (vi) the dAb fragment (Ward et al., 341 Nature 544 (1989)) which consists of a VH domain or a VL domain that binds antigen; (vii) isolated CDR regions or isolated CDR regions presented in a functional framework; (viii) F(ab′)2 fragments which are bivalent fragments including two Fab′ fragments linked by a disulphide bridge at the hinge region; (ix) single chain antibody molecules (e.g., single chain Fv; scFv) (Bird et al., 242 Science 423 (1988); and Huston et al., 85 PNAS 5879 (1988)); (x) “diabodies” with two antigen binding sites, comprising a heavy chain variable domain (VH) connected to a light chain variable domain (VL) in the same polypeptide chain (sec, e.g., EP 404,097; WO 93/11161; Hollinger et al., 90 PNAS 6444 (1993)); (xi) “linear antibodies” comprising a pair of tandem Fd segments (VH-Ch1-VH-Ch1) which, together with complementary light chain polypeptides, form a pair of antigen binding regions (Zapata et al., Protein Eng. 8 (10): 1057-62 (1995); and U.S. Pat. No. 5,641,870).

[0085] In some embodiments, the antibodies and CDRs of the present invention can be transferred to another antibody type (e.g., to the heavy chain of antibodies having heavy and light chains) to generate chimeric antibodies. It is intended that the term “antibody type” encompass any Ig class or any Ig subclass (e.g. the IgG1, IgG2, IgG3, and IgG4 subclassess of IgG) obtained from any source (e.g., humans and non-human primates, and in rodents, lagomorphs, caprines, bovines, equines, ovines, etc.).

[0086] The term “Ig class” or “immunoglobulin class”, as used herein, refers to the five classes of immunoglobulin that have been identified in humans and higher mammals, IgG, IgM, IgA, IgD, and IgE. The term “Ig subclass” refers to the two subclasses of IgM (H and L), three subclasses of IgA (IgA1, IgA2, and secretory IgA), and four subclasses of IgG (IgG1, IgG2, IgG3, and IgG4) that have been identified in humans and higher mammals. The antibodies can exist in monomeric or polymeric form; for example, IgM antibodies exist in pentameric form, and IgA antibodies exist in monomeric, dimeric or multimeric form.

[0087] The term “IgG subclass” refers to the four subclasses of immunoglobulin class IgG-IgG1, IgG2,IgG3, and IgG4 that have been identified in humans and higher mammals by the heavy chains of the immunoglobulins, V1-γ4, respectively. The term “single-chain immunoglobulin” or “single-chain antibody” (used interchangeably herein) refers to a protein having a two-polypeptide chain structure consisting of a heavy and a light chain, said chains being stabilized, for example, by interchain peptide linkers, which has the ability to specifically bind antigen. The term “domain” refers to a globular region of a heavy or light chain polypeptide comprising peptide loops (e.g., comprising 3 to 4 peptide loops) stabilized, for example, by β pleated sheet and/or intrachain disulfide bond. Domains are further referred to herein as “constant” or “variable”, based on the relative lack of sequence variation within the domains of various class members in the case of a “constant” domain, or the significant variation within the domains of various class members in the case of a “variable” domain. Antibody or polypeptide “domains” are often referred to interchangeably in the art as antibody or polypeptide “regions”. The “constant” domains of an antibody light chain are referred to interchangeably as “light chain constant regions”, “light chain constant domains”, “CL” regions or “CL” domains. The “constant” domains of an antibody heavy chain are referred to interchangeably as “heavy chain constant regions”, “heavy chain constant domains”, “CH” regions or “CH” domains). The “variable” domains of an antibody light chain are referred to interchangeably as “light chain variable regions”, “light chain variable domains”, “VL” regions or “VL” domains). The “variable” domains of an antibody heavy chain are referred to interchangeably as “heavy chain constant regions”, “heavy chain constant domains”, “VH” regions or “VH” domains).

[0088] The term “region” can also refer to a part or portion of an antibody chain or antibody chain domain (e.g., a part or portion of a heavy or light chain or a part or portion of a constant or variable domain, as defined herein), as well as more discrete parts or portions of said chains or domains. For example, light and heavy chains or light and heavy chain variable domains include “complementarity determining regions” or “CDRs” interspersed among “frame regions” or “FRs”, as defined herein.

[0089] The term “conformation” refers to the tertiary structure of a protein or polypeptide (e.g., an antibody, antibody chain, domain or region thereof). For example, the phrase “light (or heavy) chain conformation” refers to the tertiary structure of a light (or heavy) chain variable region, and the phrase “antibody conformation” or “antibody fragment conformation” refers to the tertiary structure of an antibody or fragment thereof.

[0090] “Specific binding” of an antibody means that the antibody exhibits appreciable affinity for a particular antigen or epitope and, generally, does not exhibit significant cross reactivity. “Appreciable” binding includes binding with an affinity of at least 25 μM. Antibodies with affinities greater than 1×10⁷ M⁻¹ (or a dissociation coefficient of 1 μM or less or a dissociation coefficient of 1 nm or less) typically bind with correspondingly greater specificity. Values intermediate of those set forth herein are also intended to be within the scope of the present invention and antibodies of the invention bind with a range of affinities, for example, a K_{D} of 100 nM or less, 75 nM or less, 50 nM or less, 25 nM or less, for example 10 nM or less, 5 nM or less, 1 nM or less, or in embodiments 500 pM or less, 100 pM or less, 50 pM or less or 25 pM or less. An antibody that “does not exhibit significant crossreactivity” is one that will not appreciably bind to an entity other than its target (e.g., a different epitope or a different molecule). For example, an antibody that specifically binds to a target molecule will appreciably bind the target molecule but will not significantly react with non-target molecules or peptides. An antibody specific for a particular epitope will, for example, not significantly cross-react with remote epitopes on the same protein or peptide. Specific binding can be determined according to any art-recognized means for determining such binding. Preferably, specific binding is determined according to Scatchard analysis and/or competitive binding assays.

[0091] As used herein, the term “affinity” refers to the strength of the binding of a single antigen-combining site with an antigenic determinant. Affinity depends on the closeness of stereochemical fit between antibody combining sites and antigen determinants, on the size of the area of contact between them, on the distribution of charged and hydrophobic groups, etc. Antibody affinity is measured by incubating a defined amount of the antibody with a defined amount of the antigen under a defined condition and finding the quantity of the antibody bound to the defined amount of antigen. Antibody affinity can be measured by equilibrium dialysis or by the kinetic BIACORE™ method. The dissociation constant, Kd, and the association constant, Ka, are quantitative measures of affinity. The affinity value may be measure in relative ways between two or more antibodies.

[0092] In some embodiments, the antibodies described herein or identified according to the methods described herein are blocking antibodies. As used herein, a “blocking” antibody or an antibody “antagonist” is one which inhibits or reduces biological activity of the antigen(s) it binds. In some embodiments, the blocking antibodies or antagonist antibodies or portions completely inhibit the biological activity of the antigen(s).

[0093] Antibodies may act as agonists or antagonists of the recognized polypeptides. For example, the present invention includes antibodies which disrupt receptor/ligand interactions either partially or fully. The invention features both receptor-specific antibodies and ligand-specific antibodies. The invention also features receptor-specific antibodies which do not prevent ligand binding but prevent receptor activation. Receptor activation (i.e., signaling) may be determined by techniques described herein or otherwise known in the art. For example, receptor activation can be determined by detecting the phosphorylation (e.g., tyrosine or serine/threonine) of the receptor or of one of its down-stream substrates by immunoprecipitation followed by western blot analysis. In specific embodiments, antibodies are provided that inhibit ligand activity or receptor activity by at least 95%, at least 90%, at least 85%, at least 80%, at least 75%, at least 70%, at least 60%, or at least 50% of the activity in absence of the antibody.

[0094] The invention also features receptor-specific antibodies which both prevent ligand binding and receptor activation as well as antibodies that recognize the receptor-ligand complex. Likewise, encompassed by the invention are neutralizing antibodies which bind the ligand and prevent binding of the ligand to the receptor, as well as antibodies which bind the ligand, thereby preventing receptor activation, but do not prevent the ligand from binding the receptor. Further included in the invention are antibodies which activate the receptor. These antibodies may act as receptor agonists, i.e., potentiate or activate either all or a subset of the biological activities of the ligand-mediated receptor activation, for example, by inducing dimerization of the receptor. The antibodies may be specified as agonists, antagonists or inverse agonists for biological activities comprising the specific biological activities of the peptides disclosed herein. The antibody agonists and antagonists can be made using methods known in the art. See, e.g., U.S. Pat. No. 5,811,097; Deng et al., Blood 92 (6): 1981-1988 (1998); Chen et al., Cancer Res. 58 (16): 3668-3678 (1998); Harrop et al., J. Immunol. 161 (4): 1786-1794 (1998); Zhu et al., Cancer Res. 58 (15): 3209-3214 (1998); Yoon et al., J. Immunol. 160 (7): 3170-3179 (1998); Prat et al., J. Cell. Sci. III (Pt2): 237-247 (1998); Pitard et al., J. Immunol. Methods 205 (2): 177-190 (1997); Liautard et al., Cytokine 9 (4): 233-241 (1997); Carlson et al., J. Biol. Chem. 272 (17): 11295-11301 (1997); Taryman et al., Neuron 14 (4): 755-762 (1995); Muller et al., Structure 6 (9): 1153-1167 (1998); Bartunek et al., Cytokine 8 (1): 14-20 (1996).

[0095] In some embodiments, the antibodies as defined for the present invention include derivatives that are modified, i.e., by the covalent attachment of any type of molecule to the antibody such that covalent attachment does not prevent the antibody from generating an anti-idiotypic response. For example, but not by way of limitation, the antibody derivatives include antibodies that have been modified, e.g., by glycosylation, acetylation, pegylation, phosphylation, amidation, derivatization by known protecting/blocking groups, proteolytic cleavage, linkage to a cellular ligand or other protein, etc. Any of numerous chemical modifications may be carried out by known techniques, including, but not limited to specific chemical cleavage, acetylation, formylation, metabolic synthesis of tunicamycin, etc. Additionally, the derivative may contain one or more non-classical amino acids.

[0096] Simple binding assays can be used to screen for or detect antibodies that bind to a target protein, or disrupt the interaction between proteins (e.g., a receptor and a ligand). Because certain targets of the present invention are transmembrane proteins, assays that use the soluble forms of these proteins rather than full-length protein can be used, in some embodiments. Soluble forms include, for example, those lacking the transmembrane domain and/or those comprising the IgV domain or fragments thereof which retain their ability to bind their cognate binding partners. Further, agents that inhibit or enhance protein interactions for use in the compositions and methods described herein, can include recombinant peptido-mimetics.

[0097] Detection methods useful in screening assays include antibody-based methods, detection of a reporter moiety, detection of cytokines as described herein, and detection of a gene or gene signature.

[0098] Another variation of assays to determine binding of a receptor protein to a ligand protein is through the use of affinity biosensor methods. Such methods may be based on the piezoelectric effect, electrochemistry, or optical methods, such as ellipsometry, optical wave guidance, and surface plasmon resonance (SPR).

### Vector Delivery

[0099] The invention also provides a delivery system comprising one or more vectors or one or more polynucleotide molecules, the one or more vectors or polynucleotide molecules comprising one or more polynucleotide molecules encoding an antibody of the present invention.

[0100] In general, and throughout this specification, the term “vector” refers to a nucleic acid molecule capable of transporting another nucleic acid to which it has been linked. Vectors include, but are not limited to, nucleic acid molecules that are single-stranded, double-stranded, or partially double-stranded; nucleic acid molecules that comprise one or more free ends, no free ends (e.g., circular); nucleic acid molecules that comprise DNA, RNA, or both; and other varieties of polynucleotides known in the art. One type of vector is a “plasmid,” which refers to a circular double stranded DNA loop into which additional DNA segments can be inserted, such as by standard molecular cloning techniques. Another type of vector is a viral vector, wherein virally-derived DNA or RNA sequences are present in the vector for packaging into a virus (e.g., retroviruses, replication defective retroviruses, adenoviruses, replication defective adenoviruses, and adeno-associated viruses). Viral vectors also include polynucleotides carried by a virus for transfection into a host cell. Certain vectors are capable of autonomous replication in a host cell into which they are introduced (e.g., bacterial vectors having a bacterial origin of replication and episomal mammalian vectors). Other vectors (e.g., non-episomal mammalian vectors) are integrated into the genome of a host cell upon introduction into the host cell, and thereby are replicated along with the host genome. Moreover, certain vectors are capable of directing the expression of genes to which they are operatively-linked. Such vectors are referred to herein as “expression vectors.” Vectors for and that result in expression in a eukaryotic cell can be referred to herein as “eukaryotic expression vectors.” Common expression vectors of utility in recombinant DNA techniques are often in the form of plasmids.

### PLATFORMS AND METHODS FOR GENERATING ANTIBODIES

[0101] In one aspect, the present invention provides a platform for generating antibodies. The platform is entirely in vitro and allows for efficiently screening and identification of CDRs capable of binding an antigen of interest. The platform provides for libraries of DNA sequences encoding antibodies and methods of generating said libraries. The platform provides for screening the library by ribosome display. The platform provides for identifying families of antibodies capable of binding to an antigen of interest. The platform provides for affinity maturation by mutating selected antibodies. The platform provides for validation of antibodies.

### CeVICA (Cell-Free VHH Identification Using Clustering Analysis)

[0102] CeVICA is an integrated platform for in vitro VHH domain antibody engineering distinct that generates CDR-randomized VHH libraries, optimizes ribosome display, can contain a selection cycle with built-in background reduction, and includes a computational approach to perform global binder prediction from post-selection libraries. CeVICA had previously enabled the rapid generation of more than 800 predicted binder families targeting SARS-COV-2 spike receptor binding domain and engineered potent neutralizing antibodies against SARS-COV-2 in response to an ongoing global pandemic caused by the virus (Cohen, 2020; Zhou et al., 2020).

[0103] CeVICA leverages the advantages of cell-free display. The process can start with a linear DNA library as input, in which each sequence is unique and encodes for an artificial nanobody with three fully randomized CDRs, and where the 5′ and 3′ ends of the DNA molecules contain elements required for in vitro ribosome display. Next, CeVICA uses ribosome display to link genotype (RNAs transcribed from DNA input library that are stop codon free, and stall ribosome at the end of the transcript) and phenotype (folded nanobody protein tethered to ribosomes due to the lack of stop codon in the RNA). In each selection cycle, the displaying ribosomes bind to an immobilized target, followed by RT-PCR of the RNA attached to the bound ribosomes, which leads to double stranded DNA, which is then in vitro transcribed/translated in a new round of ribosome display. The double stranded DNA in any chosen round is sequenced to obtain full-length nanobody sequences.

[0104] CeVICA then groups the sequences into clusters based on similarity of their CDR sequences, such that each cluster represents a unique binding family. One representative sequence from each cluster can be synthesized and characterized for specific downstream applications. The combination of linear DNA libraries, ribosome display, and selection cycles allow display of libraries with much larger diversity (>10¹⁰) than methods depending on cells at similar experimental scale. As selection increases the representation of sequences encoding binders, each binder sequence leads to a cluster of sequences in the output library. Computational clustering following high throughput sequencing identifies them efficiently, promising a more comprehensive view of the landscape of binder potential, as compared to methods that rely on the analysis of individual colonies or sequences (Huo et al., 2020; McMahon et al., 2018).

[0105] VHH libraries containing highly random CDRs can be made based on an analysis of natural VHH sequences and using a three-stage PCR and ligation process. First, to guide the VHH library sequence design, the sequence characteristics of many (e.g., around about 300) unique camelid VHHs (representing natural VHHs) from the Protein Data Bank (PDB298) can be analyzed to highlight the three CDR regions, CDR1-3, separated by four regions of low diversity, frame1-4. Analysis of a larger datasets (e.g., containing around about 1,030 sequences from abYsis) show the same sequence features. Consensus sequences can be extracted to design VHH DNA templates encoding the four frames and additional frames can be included to the final mixture of frame templates, based on well-characterized nanobodies. The mixture of VHH frames can serve as templates in PCR reactions, where DNA oligonucleotides with a 5′ NNB sequence can be used to introduce randomization in CDRs, while hairpin DNA oligonucleotides can be used to block ligation of one end of the PCR product. Random amino acids can be introduced for CDR1, for CDR2, and/or for CDR3 to match the most commonly observed CDR lengths in natural VHHs. CDR3s longer than 13 amino acids only account for a minority of natural VHHs (e.g., 36%) and need not be included in the VHH library. CDRs randomized in earlier stages can be subject to duplication in later stages that reduces their diversity. Therefore, CDR2 can be randomized first, followed by CDR1, and then CDR3, which imposes a diversity hierarchy of CDR3>CDR1>CDR2, because this is the overall ranking of diversity that had been observed in CDRs in natural VHHs. The sequence profile of resulting randomized VHH library can meet the design objectives, and largely can mirror the sequence features of natural VHHs. Notably, such library design differs from pervious synthetic nanobody library designs in several keyways: CDR boundaries and length are defined differently (based on the analysis of natural nanobodies. Complete randomization can be performed on all CDR positions with NNB codons (and there is no need to avoid, for example, cysteines in these positions) to maximize amino acid sequence possibilities. Finally, the VHH DNA libraries can contain elements to enable ribosome display, such as an upstream T7 promoter to allow transcription of VHH RNA, a 3xMyc tag, and a spacer downstream of the VHH coding region that stalls peptide release.

[0106] The performance of the library in ribosome display can be tested and unproductive sequences can be reduced, such as VHHs that contain frame shifts or carly stops, by ribosome displaying a library only with randomized CDR 1 and CDR2 and performing one round of anti-Myc selection. Functional VHH sequences will express Myc tag at the C-terminal of VHH and are expected to be enriched after anti-Myc selection. A large decrease of unproductive sequences and an increase of full-length VHHs (from 25.3% to 51.9%) can be obtained after anti-Myc enrichment. At the DNA level, there can be an increase of all in-frame CDRI DNA lengths and a decrease of frameshift lengths. The resulting full-length enriched CDR1 and 2 randomized library can be used as PCR template for randomization of CDR3. The final library with all three CDRs randomized (hereafter, “the input library”) can contain a significant proportion of full-length sequences (for example, around about 27.5%), and full-length diversity can be more than 10¹¹ per pg of library DNA.

[0107] Binders can be selected by identifing target specific binders by clustering CDR sequences enriched after selection into families, while accounting for sequencing errors. First, the distribution of the sequence match scores can be examined between randomly selected pairs of sequences within a CDR in a library, and these distributions can be compared for each CDR between the input and output libraries. In pre-selection input libraries, the mean match score can be low and the distribution unimodal, as expected given the randomization; whereas after selection, there can be a multi-modal distribution, with one low mode (similar to input) and at least one high mode, which is further distinguished when combining CDR1 and CDR2 match scores. The high mode should reflect binders enriched by the selection rounds. Sequences with a high match score in one CDR can be more likely to have a higher match score in other CDRs. The likely binder sequences can be clustered when exceeding a combined (CDR1+2) match score threshold. This can yield unique clusters for each antigen or binding partner, which some clusters potentially being shared by the two targets. Shared clusters represent background binders and can be excluded from further analysis due to a lack of showing of specific binding to either target. In other words, the shared clusters represent background binders and are excluded from further analysis, because they do not show specific binding to either target.

[0108] The input, output and natural CDR sequence distributions can be compared to assess whether starting with a fully random CDR amino acid profile could be generally detrimental to the fitness of binders, and whether selection output mimics a natural amino acid distribution. In natural VHHs, CDR1 and CDR2 can be less diverse than CDR3 with an amino acid profile that favors certain residues, and previous synthetic nanobody library designs sought to recapitulate the CDR1 and CDR2 amino acid preferences of natural nanobodies. However, fully-randomized NNB codons can be used to encode all CDR positions. In principle, such a design might not be ideal if the natural CDR1 and CDR2 amino acid profile is required for functional nanobodies; but it may allow the recovery of possibilities not captured by libraries pre-biased by natural sequence distributions. The output binder CDR profile can be predominantly influenced by the input library rather than by selection towards a natural VHH profile, a natural VHH CDR amino acid profile is not required for VHH binding properties, and a fully random CDR design offers high diversity without a major binding fitness cost (although may have other fitness drawbacks in vivo).

[0109] Affinity maturation can effectively improve VHH function. To perform affinity maturation, a critical stage in antibody development in animals, an affinity maturation strategy can be performed based on CeVICA to increase the affinity of target binding VHHs. Error-prone PCR can be used to introduce random mutations across the full-length sequence of various selected VHHs (for example, around 6) and a mutagenized library can be generated. A library size of around about 4.18×10¹⁰ diversity (sufficient to cover the full diversity of VHHs with three mutations per sequence) can be used as input and up to three rounds (or more) of stringent selection can be performed. The libraries can be sequenced pre-and post-affinity maturation, and the mutations in the pre-library and the mutations in the post-library per sequence can be determined. The position-wise amino acid profiles can be calculated and determined for each VHH, and the change in each amino acid proportion at each position can be determined, generating a percent point change table. The putative beneficial mutations can be determined as those with a percent point increase above a set threshold, which can highlight various putative beneficial mutations for each of the selected VHHs. Finally, a list of identified putative beneficial mutations for each VHH can be assembled and incorporated into different combinations of them into each VHH parental sequence to generate multiple mutated variants of each VHH for final assessment.

[0110] The potential impact that the VHH sequences may have on immunogenicity in humans can be examined, as a major concern related to the therapeutic use of VHH antibodies is the possibility that, as camelid proteins, they would elicit an immune response. In particular, VHH hallmark residues in frame2 constitute a major difference between camelid VHHs and human VHs. Affinity maturation data can be used to identify potential conversion options for these VHH hallmark residues. It has been found that VHH hallmark residues can be converted to the corresponding human residue as a result of affinity maturation. This implied that at least some of the VHH hallmark residues can be converted to human residues without loss of binding fitness. Such conversions can serve as frame features of VHH library design and improve tolerance of in vitro engineered VHHs by humans. Single domain antibody frames containing all four human hallmark residues have been successfully used for in vitro engineering of single domain antibodies without light chain, demonstrating the feasibility of converting VHH hallmark residues to human residues. Overall, the extension of CeVICA for affinity maturation can offer a strategy for improving antibody function.

[0111] True binders and/or neutralizers can also be identified from lower ranked clusters across a full list of clusters. VHHs representing different clusters selected from various locations on the list of clusters ranked by cluster size can be assayed by, for example, ELISA. Positive binders can be identified among many tested VHHs (e.g., around about 78.9% positive rate), further validating the efficacy of the CDR-directed clustering approach for selection of binders.

[0112] CeVICA can be used to produce highly potent virus neutralizing agents through iterative optimization.

[0113] CeVICA uses NNB codons to randomize CDRs, which may cause over-representation of certain amino acids that could contribute to poor biophysical properties in the output VHHs. The extent of such potential undesired effects can be evaluated by several biophysical assays. Size exclusion chromatography analysis of nanobodies can be performed to show that a majority (e.g., >90%) of the molecules exist as monomers. The impact of cysteines in CDRs on nanobody biophysical properties and function can also be investigated because cysteine can occur at much higher frequencies in the library CDRs than in natural VHH CDRs.

[0114] Non-reducing SDS-PAGE gel analysis of VHHs with 0-2 cysteines in their CDRs (using, for example, samples stored at 4° C. for at least 4 weeks) can reveal that VHHs with no CDR cysteine might only have one monomer band, while VHHs with 1 or 2 CDR cysteine might either have a single monomer band or a monomer and a dimer band. Dimers might not be detected in freshly purified samples and might appear overtime at relatively low rate (FIG. 16b). Thus, presence of cysteine in CDRs do not always cause VHH dimers due to disulfide bond formation. The functional consequences of CDR cysteine mediated dimer formation can be evaluated. Older samples, for example around about 7 month-old samples, can show increased signal in ELISA compared to fresh samples and this signal increase can be suppressed by treating with reducing reagent that breaks up disulfide bond. Disulfide bond formation via CDR cysteine does not appear to adversely affect the function of VHHs.

[0115] The thermal stability of VHHs produced by CeVICA can also be assessed. VHHs can show good resistance to thermal denaturation and have a melting temperature of, for example, around about 72° C., which is comparable to VHHs generated by other methods. The ability to refold after complete thermal denaturation can be compared by ELISA readings of VHH samples before and after heating at 98° C. for 10 minutes. A heated/non heated ratio greater than 1, indicating increased binding affinity after complete thermal denaturation and refolding, which could result from expedited disulfide bond formation that may increase the percentage of dimers in the samples subjected to heating. This hypothesis is supported by the observation that samples heated and refolded in the presence of reducing reagent can have a heated/non heated ratio of 1. Thus, VHHs produced by CeVICA can have good thermal stability and can efficiently refold after complete thermal denaturation.

[0116] The CeVICA platform offers a generalizable solution for in vitro VHH antibody engineering that integrates all the components necessary to generate VHH binder sequences in a cell-free process. CeVICA VHH libraries are designed to contain only the essential features for robust VHH structure, revealed by the diversity profile across the length of natural VHHs. Fully random NNB encoded codons in all CDR positions have been validated to not adversely affect binder selection or impact biophysical stability of individual VHHs produced by the platform. A linear DNA library of such design can be efficiently produced by a method of successive PCR and ligation, yielding large libraries with their library size directly quantifiable. This library generation method is highly adaptable, for example, oligos containing alternative base mix ratios can be used to achieve different amino acid profiles for specific CDR positions, alternative frame template sequences can be used to enrich for unique biophysical properties encoded in the frame regions of VHHs. Lastly, these linear libraries perform well when used as input to an optimized ribosome display based selection protocol, which suppresses sequence segment shuffling that could break up CDR pairing, a challenging problem often associated with cell free systems.

[0117] A key feature of CeVICA is binder sequence recover using CDR-directed clustering. This approach fully utilizes all sequences in the output library to provide a comprehensive view of all binders contained in the output and, in effect, reduces the VHH characterization screen space. This feature makes CeVICA particularly suited for applications where large numbers of antibodies need to be screened to isolate ones with unique traits (e.g., virus neutralization, receptor activation, targeting hard-to-target epitopes) in addition to binding the target. Without computational clustering, it can be difficult to recover VHHs with specific traits by random sampling.

[0118] Previous synthetic nanobody library designs sought to randomize CDR positions using an amino acid profile that recapitulates the profile observed in the corresponding positions in natural nanobodies; however, whether the natural profile represents an ideal profile for the purpose of in vitro antibody engineering is not certain. The large number of nanobody clusters that can be generated using CDR-directed clustering offers the opportunity to test the fitness of randomized amino acid profile in binder selection. In many positions, the output binder profile can highly resemble the input library profile, while the similarity between the output profile and the natural profile can be lower. For positions where the output profile moves significantly away from the input profile, the distance between output and natural profiles can be greater than that between output and input, and also greater than the distance between input and natural, which can indicate that the output profile is not moving closer to a natural profile in these positions. The amino acid profiles observed in natural nanobodies are not necessarily more fit than an NNB profile for binder selection (although they may be more fit for other features). A strategy to improve the fitness of an input library can be to incorporate amino acid profiles that match the output profile, which can be achieved by using specifically defined (non-equal) base mix ratios for the three base positions of a randomizing codon. Such a strategy could provide improvements on synthetic nanobody library design.

[0119] VHHs produced by CeVICA can show good biophysical properties that are comparable to VHHs of animal origin. For example, robust refolding after complete thermal denaturation up to 100% can be seen. Such high refolding capability may be partly explained by the use of ribosome display for the selection of VHHs, during which VHHs need to fold into their functional confirmation while tethered to ribosomes in a minimally reconstituted protein synthesis environment that lacks factors normally found inside cells to aid protein folding such as chaperons, thus enriching for VHHs with strong inherent folding stability. This hypothesis could be tested further as CeVICA gets applied to more cases. CeVICA's suitability for engineering high affinity VHH antibodies with comparable biophysical properties as VHHs produced by animals has been demonstrated, making it a valuable addition to in vitro antibody engineering technologies.

[0120] In conclusion, CeVICA is a system for synthetic VHH based antibody library design, in vitro selection optimization, post-selection screening, and affinity maturation. Using CeVICA, large collections of antibodies that can bind the antigens can provide an important resource. Given its seamlessly integrated procedure, CeVICA is amenable to automation and provides an important tool for antibody generation in a rapid, reliable and scalable manner. CeVICA further provides a technology framework for incorporation of refinements that could overcome limitations of in vivo fitness of in vitro generated antibodies and the overall efficiency of cell-free antibody engineering.

[0121] For example, but not meant to be limiting, nanobodies (VHHs) can be separated into CDRs and frames (segments) by finding regions of continuous sequence in each VHH that best matched to the following standard frame sequences: frame1 standard:

[0122] EVOLVESGGGLVQAGDSLRLSCTASG (SEQ ID NO: 13102), frame2 standard: MGWFRQAPGKEREFVAAIS (SEQ ID NO: 13103), frame3 standard: AFYADSVRGRFSISADSAKNTVYLQMNSLKPEDTAVYYCAA (SEQ ID NO: 13104), frame4 standard: DYWGQGTQVTVSS (SEQ ID NO: 13105). Each matched region is the corresponding frame of the VHH, the region between frame1 and frame2 is CDR1, the region between frame2 and frame is CDR2, the region between frame3 and frame4 is CDR3 (see FIG. 3). Only nanobody sequences with at least one unique CDR can be selected to represent natural nanobodies and used for constructing amino acid profile (a.a. profile). 298 sequences from Protein Data Bank (PDB298) and 1,030 sequences from abYsis (abYsis1030) can fit this selection criteria. The amino acid (a.a.) profile at each position within each segment can be calculated by finding the percentage of each of the 20 universal proteinogenic amino acid at that position among all selected VHHs, all frame lengths can be set to the same length as frame standards. CDR lengths can be manually set to accommodate different CDR lengths, CDR1 and CDR2 lengths can be set to 10, CDR3 length can be set to 30. VHHs with CDR lengths shorter than the corresponding set length can have their CDR filled from the C-terminal end with empty position holders up to the set length. CDR boundaries can be defined by the position where the combined frequency of the top two most abundant amino acids dropped sharply.

[0123] The above referenced annotation method, and the methods according to Kabat and Chothia (www.abysis.org/abysis/sequence_input/key_annotation/key_annotation.cgi) have been compared and all three methods (Kabat, Chothia and the above) showed frame regions with the same core sequence, and with 1-2 amino acid differences in the exact CDR boundaries between the three methods. The performance of the above-referenced library suggests their annotation faithfully captured the domain structure of nanobodies.

[0124] VHH library construction. Nanobody library sequence can be designed to recapitulate the sequence structure of frames and CDRs observed from analyzing natural nanobodies (see PDB298, abYsis1030). The design differs from prior designs in both the length of CDRs and the positions selected for randomization and randomization strategy. Such differences likely arise from differences in the size of natural nanobody collection retrieved from databases and/or in how the nanobodies are annotated and analyzed (Amino acid profile construction and analysis of natural nanobodies). For example, the analysis showed the percentage of nanobodies containing CDR2 with lengths 4, 5, or 6 amino acids (a.a). are 32%, 61%, and 1.7% respectively, so CDR2 with a length of 5 a.a. can be chosen to recapitulate the most prevalent CDR2 length.

[0125] VHH libraries can be constructed by ligation of PCR products in three stages, with each stage randomizing one of the three CDRs. Primers can be synthesized using standard DNA oligo synthesis and purified by desalting without PAGE purification, The level of synthesis errors with standard oligo synthesis and desalting purification may not have significant impact on the functionality of the nanobody library. At each stage, PCR can be performed using a high-fidelity DNA polymerase without strand displacement activity, using Phusion DNA polymerase (New England Biolabs, M0530L). 65° C. can be used as the elongation temperature to avoid hairpin opening during DNA elongation. PCR products with correct size can be purified by DNA agarose gel extraction. Ligation and phosphorylation of PCR products can be performed simultaneously using T4 DNA ligase (New England Biolabs, M0202L) and T4 Polynucleotide Kinase (New England Biolabs, M0201L). Ligation products with the correct size can be purified by DNA agarose gel extraction using NucleoSpin Gel and PCR Clean-Lip Kit (Takara, 740609.250). Purified ligation products can be quantified with Qubit IX dsDNA HS Assay Kit (ThermoFisher Scientific, Q33230 using Qubit 3 Fluorometer.

[0126] CDR2 can be randomized in stage one, PCR templates with equal molar mixtures of plasmids carrying DNA encoding frames, including three frame 1 versions, one frame2, three frame3 versions and one frame4. The three versions of framel and frame3 can be derived from consensus sequence extracted from natural VHH a.a. profiles. CDRI can be randomized in stage two: 200 ng of ligation product from the first stage can be digested by Notl-HF (New England Biolabs, R3189S) and heat denatured. The entire digestion product can be used as template for PCR in stage two. Ligation product of stage two can be subject to one round of ribosome display and anti-Myc selection (below), the entire recovered RNA can be reverse transcribed and PCR amplified and purified.

[0127] 270 ng of this RT-PCR product can be used as template for PCR in stage three to randomize CDR3. Ligation product of stage three can be purified by DNA agarose gel extraction. The purified ligation product can then be digested by Dral (New England Biolabs, R0129S) and a fragment of −680 bp in size can be purified by DNA agarose gel extraction to get the final VHH library, referred to as the input library.

[0128] High throughput full-length sequencing of VHH library. Sequencing libraries from VHH DNA libraries can be prepared by two PCR steps using primers and PCR cycling conditions. Equal mixtures of Phusion DNA polymerase (New England Biolabs, M0530L) and Deep Vent DNA polymerase (New England Biolabs, M0258L) can be used for both PCRs to ensure efficient amplification. PCR cycle number can be chosen to avoid over-amplification and typically falls between 5 to 15.

[0129] In the first PCR, Illumina universal library amplification primer binding sequence and a stretch of variable lengths of random nucleotides can be introduced to the 5′ end of library

[0130] DNA. Similarly, Illumina universal library amplification primer binding sequence and a stretch of variable lengths of index sequence can be introduced to the 3′ end of library DNA. Eight different lengths can be used for both random nucleotides and index to create staggered VHH sequences in the sequencing library, this arrangement can be required for high quality sequencing of single amplicon libraries on an Illumina Miseq instrument. The product of the first PCR can be purified by column clean-up using NucleoSpin Gel and PCR Clean-Up Kit and the entire sample can be used as template for the second PCR.

[0131] In the second PCR, Illumina universal library amplification primers can be used to generate sequencing library. Sequencing libraries can be purified by DNA agarose gel extraction, quantified using Qubit 3 Fluorometer, and sequenced on an Illumina Miseq instrument using MiSeq Reagent Nano Kit v2 (500-cycles) (Illumina, MS-103-1003). Sequencing run setup can be: paired end 2×258 with no index read. Index in the library can be designed as inline index, so a separate index read might not be required. Raw reads can be separated by index, trimmed to remove N bases and bases with a quality score of less than 10 prior to downstream analysis.

[0132] Ribosome display. VHH DNA library containing a specified amount of diversity can be first amplified using a DNA recovery primer pair. Equal mixtures of Phusion DNA polymerase (New England Biolabs, M0530L) and Deep Vent DNA polymerase (New England Biolabs, M0258L) can be used for the PCR. PCR cycle number can be chosen to avoid overamplification and typically falls between 5 and 15. In a standard preparation, 200-500 ng of the purified PCR product can be used as DNA template in 25 pl of coupled in vitro transcription and translation reaction using PURExpress In Vitro Protein Synthesis Kit (New England Biolabs, E6800L). The reaction can be incubated at 37° C. for 30 minutes, then placed on ice, and 200 pl ice cold stop buffer (10 mM HEPES pH 7.4, 150 mM KCl, 2.5 mM MgCh, 0.4 pg/pl BSA (New England Biolabs, B9000S), 0.4 U/pl SUPERascHn (ThermoFisher Scientific, AM2696), 0.05% TritonX-100) can be then added to stop the reaction. This stopped ribosome display solution can be used for binding to immobilized protein targets during in vitro selection. The amount of DNA template, volume of coupled in vitro transcription and translation reaction, and volume of stop buffer were scaled proportionally when different volumes of stopped ribosome display solution can be needed. 1 to 8× standard preparations can be used for each selection round with the first round using 8× standard preparations, second round using 2× standard preparations and third round using IX standard preparation.

[0133] In vitro selection. Target proteins can be immobilized to magnetic beads by first coating protein G magnetic beads (ThermoFisher Scientific, 10004D) with anti-Flag antibody (Sigma-Aldrich, Fl 804), then incubating antibody-coated beads with cell lysate or cell media containing 3xFlag tagged target proteins at 4° C. for 2 hours. For anti-Myc selection, magnetic beads can be coated by anti-Myc antibody (ThermoFisher Scientific, 13-2500) only. 100 pl of beads can be used for the first round of selection, and 50 pl of beads can be used for subsequent rounds. The beads can be washed three times with PBST (PBS, ThermoFisher Scientific, with 0.02% TritonX-100). Stopped ribosome display solutions can be first incubated with antibody-coated beads (without targets) at 4° C. for 30 minutes for pre-clearing of non-specific and off-target binders, the solution can then be transferred to target immobilized beads and incubated at 4° C. for 1 hour, the target immobilized beads can then be washed 4 times with wash buffer (10mM HEPES pH 7.4, 150 mM KCl, 5 mM MgCh, 0.4 pg/pl BSA (New England Biolabs), 0.1U/pl SUPERascHn (ThermoFisher Scientific), 0.05% TritonX-100). After washing, beads can be resuspended in TRIzol Reagent (ThermoFisher Scientific, 15596026), and RNA can be extracted from the beads, 25 pg of linear acrylamide (ThermoFisher Scientific, AM9520) can be used as co-precipitant during RNA extraction. Reverse transcription of extracted RNA can be performed using Maxima H Minus Reverse Transcriptase (ThermoFisher Scientific) and primers. The reverse transcription reaction can be purified using SPRIselect Reagent (Beckman Coulter) to obtain purified cDNA. Purified cDNA can be amplified by PCR using equal mixtures of Phusion High-Fidelity DNA polymerase and Deep Vent DNA polymerase. PCR cycle number (Table 12) can be chosen to avoid over-amplification and typically falls between 10 to 25. This PCR condition ensures efficient full-length product synthesis at each cycle and is required to faithfully amplify nanobody genes without CDR shuffling, a phenomenon that could otherwise cause selection failure. The PCR product can be purified by DNA agarose gel extraction. The purified PCR product can be used for library generation for high throughput full-length sequencing or as DNA input for ribosome display reaction (coupled in vitro transcription and translation) to perform additional rounds of in vitro selection.

[0134] One round of anti-Myc selection can be performed on the nanobody library with CDR1 and 2 randomized to enrich for correct-frame sequences. Several factors can in principle contribute to the presence of out-of-frame sequences after anti-Myc selection: (1) Non-specific binding of RNA or protein to magnetic beads; (2) translation through alternative start codons downstream of areas containing out-of-frame errors; and/or (3) inefficient binding of anti-Myc antibody to the expressed Myc peptide that is located between the VHH protein and ribosome. Option 1 is disfavored, because although their input library contained 27.5% full-length sequences, the remaining sequences that contained errors do not interfere with full-length sequences and are reduced to <10% after three rounds of RBD selection, suggesting that erroneous sequences or their encoded peptides do not non-specifically stick to beads at significant levels to impact binder selection.

[0135] CDR-directed clustering analysis. Computational analysis for CDR-directed clustering can be performed using custom python scripts. Paired end sequences can be merged to form full-length VHH sequences. Merged VHH sequences can be quality trimmed and translated into VHH protein sequence, which can be separated into CDRs and frames (segments) as described above. Two VHHs can be determined to have similar CDRs via the following steps. First, the ungapped sequence alignment score (match score) can be calculated for each CDR of the two VHHs as the sum of BLOSUM6230 amino acid pair scores at each aligned position. (If two CDRs have different lengths, their sequence alignment score can be set to −5 by default.) The alignment scores of any two pairs of CDRs can be summed to yield three scores, and if at least one of the three is larger than 35, the two VHHs can be defined as having similar CDRs. Next, VHHs with similar CDRs can be grouped by a two-step process. In the first step, VHH cluster-forming “seeds” can be chosen whose VHHs that were called as similar to at least 5 other VHHs (all remaining VHHs were not considered for clustering). In the second step, a seed VHH was iteratively selected with at least 5 other similar (>35 match score) seed VHHs, and grouped all of them into one cluster, removing them from the seed VHH pool, and iterated this procedure until no seed VHHs remained. For example, for one antigen, there can be 83,433 seeds in the first step, and 83,392 can be grouped in clusters in the second step. For a different antigen, 71,210 of 71,220 seeds can be grouped in clusters. This heuristic was fast in a standard computing environment with multiprocessing capabilities.

[0136] A representative sequence to illustrate each CDR in each cluster can be chosen as the most frequent CDR sequence in the cluster (the chosen representatives for CDR1,2, and 3 may not necessarily be from the same sequence, and were used only for illustrative purposes for each cluster; whole VHH sequences can be used for gene synthesis and all downstream experiments). A consensus sequence can be generated for each CDR, where each position in the CDR can be represented by a 6 character string, such that the first and fourth character can be the single letter code for the top and the second most abundant amino acid at the position, respectively, and the following two characters (second and third for the most abundant; fifth and sixth for the second most abundant), can be their frequency, respectively (ranging from 00 for <34% to 99 for 100%). The consensus sequence for a CDR can be recorded as a single “BOO” when the standard deviation of the lengths of all CDRs was greater than 1. CDR scores can be calculated by summing a score for each position in the CDR consensus sequence, with scores of 3, 2, 1 for positions where the most abundant amino acid had frequencies greater than 80%, 50%, or less, respectively, and a score of 0 for CDRs with a consensus sequence of a single “BOO”. Representative whole nanobody sequence for each cluster can be selected as the one with the maximal sum (max−sum) of all CDR similarity score between the nanobody and all other nanobodies in the cluster. This max-sum representative nanobody sequence selection process minimizes the impact of random errors introduced during NGS library preparation and sequencing by imposing a scoring penalty on sequences containing random errors.

[0137] Mean distance to diagonal can be calculated based on squares of residuals, where the residual=y−x, the distance to diagonal (the half diagonal length of the square of residual)=\hat{ }square of residual/2. The mean distance to diagonal represents the average distance of data points to the diagonal line in a scatter plots of two amino acid profiles and is a measure of the difference between the two amino acid profiles.

[0138] Affinity maturation. Error-prone PCR can be used to introduce random mutations across the full length of selected VHH DNA sequences. 0.1 ng of plasmid carrying DNA sequence encoding each selected VHH can be used as template in PCR reactions using Taq DNA polymerase with reaction buffer (10 mM Tris-HCl pH 8.3, 50 mM KC1, 7 mM MgCh, 0.5 mM MnCh, 1 mM dCTP, 1 mM dTTP, 0.2 mM dATP, 0.2 mM dGTP) suitable for causing mutations in PCR products. Mutagenized library for input to CeVICA can be made by ligating PCR products of error-prone PCR that carries VHH to DNA fragment containing the remaining elements required for ribosome display. Three rounds of ribosome display and in vitro selection can be performed on the mutagenized library (pre-affinity maturation, after error-prone PCR) as described in the In vitro selection section, during which the incubation time of the binding step can be kept between 5 seconds to 1 minute to impose a stringent selection condition, additional error-prone PCR can be not performed during the selection cycles. The output library (post-affinity maturation) can be sequenced along with the pre-affinity maturation library as described in the High throughput full-length sequencing of VHH library section.

[0139] In some embodiments, the platform utilizes a VHH library obtained by methods described further herein. In some embodiments, the platform utilizes VHH frameworks randomized at all CDRs in the framework (e.g., CDR1, CDR2, and CDR3). Libraries can include a varying number of members, such as up to about 100 members, such as up to about 1,000 members, such as up to about 5,000 members, such as up to about 10,000 members, such as up to about 100,000 members, such as up to about 500,000 members, or even more than 500,000 members. In one example, the methods can involve providing a VHH library containing a large number of potential antibodies. Such libraries cen then screened by the methods disclosed herein to identify those library members that display a desired characteristic activity (e.g., binding).

[0140] Identification and ranking of beneficial mutations. To identify potential beneficial mutations for each selected VHH an amino acid profile (a.a. profile) table can be built for each VHH family in the pre-and post-affinity maturation library, and identified amino acids with increased frequency in the post-affinity maturation population compared to their pre-maturation frequency. For each VHH parental sequence, an a.a. profile can be built of the percent of each a.a. across all VHH sequences originated from one parental VHH in the pre-affinity maturation library (“pre-a.a. profile”) and in the post-affinity maturation library (“post-a.a. profile”). A percent point change table can be generated by subtracting the pre-a.a. profile from the post-a.a. profile, describing the change of frequency of each observed amino acid at each position of the VHH protein following affinity maturation.

[0141] A putative beneficial mutation can be defined as either (1) the non-parental amino acid with the biggest increase in frequency if its increase is at least 0.5 percentage points; the score is the difference from the parental amino acid frequency; or (2) the non-parental amino acid with the biggest increase after the parental amino acid if the increase is at least 1.5 percentage points; the score is the percent point change of the beneficial mutation. To avoid too many proximal putative beneficial mutations (which may cause structural incompatibility), a putative beneficial mutation can be discarded if it (1) is outside the CDRs; (2) is less than 3 positions away from another beneficial mutation (“nearby mutation) and has a smaller beneficial mutation score than the nearby mutation; and (3) co-occurs less than twice with the nearby mutation. From this final list of putative beneficial mutations, different combinations can be picked and incorporated into each VHH parental sequence that include one combination of all beneficial mutations in CDRs, one combination of the top-3 ranked (by beneficial mutation score) mutations in frames, and at least one combination of both CDR mutations and frame mutations.

[0142] In some embodiments, the library is generated by analyzing naturally occurring antibody frameworks (e.g., camelid heavy chain antibodies). Templates are then generated with selected frameworks. In some embodiments, frameworks are chosen having the most variation between the frameworks. Sets of primer pairs are generated to randomly mutate each CDR sequence in each framework. Each CDR is randomized with a set of two pairs of primers corresponding to the entire framework sequence. For example, the first pair of primers amplifies a first half of the framework and the second pair of primers amplifies the second half of the framework directly adjacent to the start of the first amplicon. The set of primers for the first CDR can include primers hybridizing to each end of the framework (i.e., the first pair and second pair of primers each includes a primer specific to one end). The primers specific to the ends of the framework are preferably blocked from being ligated. In some embodiments, the primers are blocked by including a hairpin sequence. The primers for randomizing in each primer pair (i.e., not the primers hybridizing to the ends) hybridize to a region that is not mutagenized and include a randomized sequence. The region for hybridization is selected such that the primer hybridizes under the PCR annealing conditions (e.g., 50-70° C.). The primers also include a randomized sequence corresponding to the number of amino acids in the region of the CDR to be mutagenized. Randomization schemes may include NNN, which uses all 64 codons; NNB, which uses 48 codons; NNK, which uses 32 codons; and MAX, which assigns equal probabilities to each of the 20 amino acids (where N=A/C/G/T, B=C/G/T, S=C/G, and K=G/T) (see, e.g., Nov, Y., Appl Environ Microbiol. 2012 January; 78 (1): 258-262). In some embodiments, randomization schemes are used that avoid stop codons.

[0143] In some embodiments, the library is generated by using PCR and ligation for each CDR in the framework. In some embodiments, the PCR primer pairs in each set generate two amplicons capable of being ligated in only one orientation due to the ends of the amplicon being blocked. The ligated PCR product from the previous step is used as the template for the successive CDR randomization steps. The randomized sequence may be present in one or both of the primer pairs for a CDR sequence (e.g., CDR3). In some embodiments, the PCR for each randomization step is performed using a DNA polymerase without or having extremely weak strand displacement activity (e.g., Phusion® High-Fidelity DNA Polymerase, New England Biolabs). The term strand displacement describes the ability to displace downstream DNA encountered during synthesis, such as a downstream double stranded region (e.g., hairpin). The terms “weak” and “strong” relate to the strength of displacement as compared to an average activity. In some embodiments, weak refers to an activity that is only slightly greater than no activity. In some embodiments, weak displacement activity refers to less than 95% or 99% of an encountered DNA strand is displaced and strong displacement activity refers to greater than 95% or 99% of encountered DNA is displaced under normal reaction conditions. In some embodiments, the CDR with the shortest sequence is randomized in the first or second cycle and the CDR with the longest sequence is randomized in the last step (e.g., CDR3).

[0144] In some embodiments, the framework sequence includes a promoter sequence. The promoter sequence is preferably compatible with in vitro transcription/translation systems (e.g., T7 promoter). In some embodiments, the promoter is a constitutive promoter, a native promoter, an inducible-promoter, or tissue-specific promoter. In some embodiments, the framework sequence includes an enhancer. Thus, in some embodiments, the library is transcribed into mRNAs encoding for each antibody framework. The mRNA can then be translated to generate the antibody polypeptide. In other embodiments, the library comprising mRNAs encoding each antibody framework are not transcribed in vitro before in vitro translation and are instead harvested from host cells or chemically synthesized by methods known in the art. In some embodiments, library members are cloned into vectors including the promoter sequence and/or enhancer sequence. In some embodiments, an individual vector may comprise one or more library members. In some embodiments, an individual vector map comprise two, three, four, five, six, seven, eight, or more library members In some embodiments, a vector comprising multiple library members may comprise one promoter and/or enhancer sequence that regulates the expression of the library members encoded therein. In some embodiments, a vector comprising multiple library members may comprise multiple promoter and/or enhancer sequences that regulates the expression of the library members encoded therein. In some embodiments, nucleic acids encoding library members may comprise one or more chemically modified moieties.

[0145] In some embodiments, the framework sequence does not include a stop codon, whereby the mRNA and translated protein is not released by ribosomes. In some embodiments, the platform includes ribosome display (see, e.g., Zahnd, et al., Ribosome display: selecting and evolving proteins in vitro that specifically bind to a target. Nat Methods 4, 269-279 (2007)). As used herein ribosome display refers to an in vitro selection and evolution technology for proteins and peptides from large libraries. In some embodiments, the antigens of interest (e.g., cell surface proteins) are provided on one or more surfaces which bind the one or more of said antigens of interest and display them on the surface. In some embodiments, the antigens of interest (e.g., cell surface proteins) are provided by one or more target cells which express one or more of said antigens of interest and display them on the cell surface. In some embodiments, the antigens of interest (e.g., cell surface proteins) are provided as individual protein molecules which freely circulate in solution and not bound or physically associated with anything until they bind to library members. In some embodiments, antigens of interest (e.g., cell surface proteins) which are provided in a solution not bound or physically associated with anything are captured after binding to library members by inducing attachment of the antigen of interest to a solid surface (e.g., a bead). In some embodiments, the antigen of interest (e.g., cell surface proteins) is immobilized to a solid surface (i.e., surface-immobilized target), such as magnetic particles, latex beads, nanoparticles, macro-beads, membranes, microplates, array surfaces, dipsticks, hydrogels, and a host of other devices that facilitate the capture of specific biomolecules. The surfaces are then used to select for translated antibody frameworks capable of binding the antigen of interest. The surfaces can be washed and mRNA can be isolated. The mRNA can be converted to cDNA by reverse transcription PCR (RT-PCR). In preferred embodiments, the PCR reaction in the RT-PCR is performed using a mixture of two DNA polymerases, wherein one type is a DNA polymerase without or having extremely weak strand displacement activity (e.g., Phusion® High-Fidelity DNA Polymerase, New England Biolabs) and the other type is a DNA polymerase with strong strand displacement activity (e.g., Deep Vent® DNA Polymerase, New England Biolabs). The cDNA can then be used as input for successive rounds of ribosome display. In preferred embodiments, 3 rounds are performed, however 1, 2, 3, 4, 5, 6, 7, 8, 9 or 10 or more rounds can be performed. In some embodiments, the number of rounds is saturated when the same library members are isolated at each round.

[0146] In some embodiments, the stringency of the washing and binding steps is adjusted to increase binding stringency. In some embodiments, stringency is increased by increasing the ionic strength of the buffers. In some embodiments, stringency is increased by adding or increasing the concentration of detergent in the buffers. The binding and washing is preferably performed at about 4° C., however stringency can be changed by increasing the temperature. In some embodiments, binding time is adjusted. In some embodiments, binding time in initial cycles of ribosome display may be longer and in successive cycles decreased to increase stringency. For example, antibodies that bind overnight can be identified in an early round. In some embodiments, binding is performed overnight (about 12 hours), 4 hours, 3, hours, 2 hours, 1 hour, or less than 1 minute. In some embodiments, binding is performed in buffers containing Mg²⁺ions at concentrations of 5 mM or less.

[0147] In some embodiments, library members are cloned into vectors including an epitope tag sequence. In some embodiments, the framework includes a sequence encoding for an epitope tag in frame with the antibody sequence and at the C-terminus of the antibody. In some embodiments, the framework includes a sequence encoding for an epitope tag in frame with the antibody sequence and at the N-terminus of the antibody. In some embodiments, the N-terminal or C-terminal tag is hemagglutinin (HA). In some embodiments, the N-terminal or C-terminal tag is FLAG. In some embodiments, the N-terminal or C-terminal tag is one, two, three, four, five, or six instances of HA (referred to as, in the example of 6 instances of HA, either 6X-HA, 6HA, or 6-HA). In some embodiments, the N-terminal or C-terminal tag is one, two, or three instances of FLAG (referred to as, in the example of 3 instances of FLAG, 3X-FLAG, 3FLAG, or 3-FLAG). In some embodiments, the N-terminal or C-terminal tag is GST, Myc, polyHis, TAP, V5, biotin, MBP, or SpyTag. In some embodiments, the N-terminal or C-terminal tag is one, two, three, four, five, six, seven, eight, or nine instances of Myc. In some embodiments, the N-terminal or C-terminal tag is one, two, three, four, five, six, seven, eight, nine, ten, eleven, or twelve instances of His. In some embodiments, the N-terminal or C-terminal tag is one, two, or three instances of V5. In some embodiments, the epitope tag can be used to enrich for full length mRNA sequences. For example, the entire antibody with the epitope tag is encoded by only a full-length mRNA. Thus, enriching for ribosomes expressing an antibody framework fused to an epitope tag will enrich for full-length mRNAs. In some embodiments, enrichment is performed for one or more rounds. In some embodiments, full-length mRNA are enriched during the step of generating the library. In some embodiments, the first or first and second CDRs are randomized. The randomized frameworks are then used in ribosome display followed by enrichment using a solid surface specific for binding to the epitope tag. The enriched mRNA are then converted to cDNA and used as input for randomizing the last CDR sequence.

[0148] Methods of enriching for antibody frameworks comprising a tag in complex with ribosomes bound to mRNAs corresponding to said antibody framework will be well available to one of ordinary skill in the art. For example, in some embodiments, epitope tagged-antibody frameworks in complex with ribosomes bound to mRNAs corresponding to the frameworks may be enriched by incubating said antibody frameworks with antibodies against the respective epitope tag. Antibodies against tags including HA, FLAG, Myc, V5, GST, TAP, MBP, and SpyTag are commercially available and may be conjugated to solid support such as beads and other affinity column materials. Alternatively, polyHis-tagged proteins can be isolated using Ni-NTA agarose beads and affinity columns comprising said beads. In further alternative approaches, biotin-tagged proteins may be isolated by incubation with solid supports (e.g., beads) bound to streptavidin. Similarly, various methods for validating enrichment of antibody frameworks and complexes thereof include western blot, flow cytometry, mass spectrometry, and enzyme-linked immunosorbent assay (ELISA).

[0149] The platform also includes computational steps capable of clustering antibodies having similar CDRs. In some embodiments, clustering allows for families of related antibodies to be identified, such that a few antibodies from each family can be further assayed or validated to determine binding or neutralizing activity of different families. In some embodiments, every family identified is further validated. In some embodiments, 1, 2, 3, 4, 5, 6, 7, 8, 9, 10 or 20 or more antibodies clustered in a family are validated.

[0150] In some embodiments, antibody frameworks identified using a randomized library are further mutated by one or more rounds of affinity maturation. Affinity maturation refers to the introduction of random mutations across the full length of selected VHH DNA sequences (i.e., also including frame regions) and performing ribosome display with the antigen of interest. In some embodiments, binding during ribosome display is performed for 1 minute or less.

[0151] In some embodiments, the platform includes assays capable of validating antibody binding and neutralization activity. In some embodiments, the validation assay is an immunoassay. Immunoassay methods are based on the reaction of an antibody to its corresponding target or analyte and can detect the analyte in a sample depending on the specific assay format. Immunoassays have been designed for use with a wide range of biological sample matrices. Immunoassay formats have been designed to provide qualitative, semi-quantitative, and quantitative results. Quantitative results may be generated by determining the concentration of analyte detected by an antibody.

[0152] Numerous immunoassay formats have been designed. Exemplary assay formats include enzyme-linked immunosorbent assay (ELISA), radioimmunoassay, fluorescent, chemiluminescence, and fluorescence resonance energy transfer (FRET) or time resolved-FRET (TR-FRET) immunoassays. Examples of procedures for detecting biomarkers include biomarker immunoprecipitation followed by quantitative methods that allow size and peptide level discrimination, such as gel electrophoresis, capillary electrophoresis, planar electrochromatography, and the like. ELISA, or enzyme immunoassay (EIA) can be quantitative for the detection of an analyte/biomarker. This method relies on attachment of a label to either the analyte or the antibody and the label component includes, either directly or indirectly, an enzyme. ELISA tests may be formatted for direct, indirect, competitive, or sandwich detection of the analyte. Additional techniques include, for example, agglutination, nephelometry, turbidimetry, Western blot, immunoprecipitation, immunocytochemistry, immunohistochemistry, flow cytometry, Luminex assay, and others (see ImmunoAssay: A Practical Guide, edited by Brian Law, published by Taylor & Francis, Ltd., 2005 edition).

[0153] Viral neutralizing assays can be used to validate identified antibody frameworks. In some embodiments, the assay uses live virus. In some embodiments, the assay uses pseudotyped virus particles (see, e.g., Gentili, 2015). In some embodiments, the neutralizing assay is performed without live virus (sec, e.g., Tan, C. W., Chia, W. N., Qin, X. et al. A SARS-COV-2surrogate virus neutralization test based on antibody-mediated blockage of ACE2—pike protein—protein interaction. Nat Biotechnol 38, 1073-1078 (2020).

[0154] Various embodiments are described herein. It should be noted that the specific embodiments are not intended as an exhaustive description or as a limitation to the broader aspects discussed herein. One aspect described in conjunction with a particular embodiment is not necessarily limited to that embodiment and can be practiced with any other embodiment(s). Furthermore, the particular features, structures or characteristics may be combined in any suitable manner, as would be apparent to a person of ordinary skill in the art from this disclosure, in one or more embodiments. Furthermore, while some embodiments described herein include some but not other features included in other embodiments, combinations of features of different embodiments are meant to be within the scope of the invention. For example, in the appended claims, any of the claimed embodiments can be used in any combination.

[0155] All publications, published patent documents, and patent applications cited herein are hereby incorporated by reference to the same extent as though each individual publication, published patent document, or patent application was specifically and individually indicated as being incorporated by reference.

[0156] Further embodiments are illustrated in the following Examples which are given for illustrative purposes only and are not intended to limit the scope of the invention.

### Compositions and Methods

[0157] In some aspects, the present disclosure provides a variety of compositions comprising antibodies or antigen-binding fragments thereof derived from the approaches described herein. In some aspects, the present disclosure also provides a variety of methods (e.g., methods of treating a subject) involving the use of antibodies or antigen-binding fragments thereof derived from the approaches described herein.

[0158] Compositions comprising an antibody or antigen-binding fragment thereof described herein may further optionally comprise a liposome, a lipid, a lipid complex, a lipid nanoparticle, a microsphere, a microparticle, a nanosphere, or a nanoparticle, or may be otherwise formulated for administration to the cells, biological samples, tissues, organs, or body of a subject in need thereof.

[0159] Compositions comprising an antibody or antigen-binding fragment thereof described herein may further comprise a pharmaceutical excipient. Pharmaceutically acceptable excipients (excipients) are substances other than the therapeutic agent that are intentionally included in the drug delivery system. Excipients do not exert or are not intended to exert a therapeutic effect at the intended dosage. Excipients may act to a) aid in processing of the drug delivery system during manufacture, b) protect, support or enhance stability, bioavailability or patient acceptability of the API, c) assist in product identification, and/or d) enhance any other attribute of the overall safety, effectiveness, or delivery of the therapeutic agent during storage or use. A pharmaceutically acceptable excipient may or may not be an inert substance. Excipients include, but are not limited to, absorption enhancers, anti-adherents, anti-foaming agents, anti-oxidants, binders, buffering agents, carriers, coating agents, colors, delivery enhancers, delivery polymers, dextran, dextrose, diluents, disintegrants, emulsifiers, extenders, fillers, flavors, glidants, humectants, lubricants, oils, polymers, preservatives, saline, salts, solvents, sugars, suspending agents, sustained release matrices, sweeteners, thickening agents, tonicity agents, vehicles, water-repelling agents, and wetting agents.

[0160] The pharmaceutical compositions comprising an antibody or antigen-binding fragment described herein can contain other additional components commonly found in pharmaceutical compositions. Such additional components can include, but are not limited to: anti-pruritics, astringents, local anesthetics, or anti-inflammatory agents (e.g., antihistamine, diphenhydramine). In fact, there is virtually no limit to the components of a composition comprising an antibody or antigen-binding fragment described herein may also include any of those that are Generally Recognized as Safe (GRAS) by the United States Food and Drug Administration.

[0161] Compositions comprising an antibody or antigen-binding fragment described herein may be suitable for treatment regimens and thereby administered to a subject via a variety of methods described herein. Such compositions may be formulated for use in a variety of therapies, such as, for example, in the amelioration, prevention, and/or treatment of conditions. Accordingly, the compositions comprising an antibody or antigen-binding fragment thereof described herein may be administered to a subject such as human or non-human subjects, a host cell in situ in a subject, a host cell ex vivo, a host cell derived from a subject, or a biological sample (e.g., one derived from a subject).

[0162] In some embodiments, administration of an antibody or antigen-binding fragment thereof described herein achieves one, two, three, four, or more of the following effects, including, for example: (i) reduction or amelioration the severity of disease, disorder, or condition or symptom associated therewith; (ii) reduction in the duration of a symptom associated with a disease, disorder, or condition; (iii) protection against the progression of a disease or disorder or symptom associated therewith; (iv) regression of a disease, disorder, or condition or symptom associated therewith; (v) protection against the development or onset of a symptom associated with a disease, disorder, or condition; (vi) protection against the recurrence of a symptom associated with a disease; (vii) reduction in the hospitalization of a subject; (viii) reduction in the hospitalization length; (ix) an increase in the survival of a subject with a disease; (x) a reduction in the number of symptoms associated with a disease, disorder, or condition; (xi) an enhancement, improvement, supplementation, complementation, or augmentation of the prophylactic or therapeutic effect(s) of another therapy.

[0163] Sterile injectable solutions comprising an antibody or antigen-binding fragment thereof described herein are prepared by solvation in the required amount of appropriate solvent in addition to any of the other ingredients enumerated above, as required, followed by filtered sterilization. Generally, dispersions are prepared by incorporating the various sterilized ingredients into a sterile vehicle that contains the basic dispersion medium and the other ingredients from those enumerated above.

[0164] For administration of an injectable aqueous solution, the composition comprising an antibody or antigen-binding fragment described herein may be suitably buffered, if necessary, and the liquid diluent first rendered isotonic with sufficient saline, polyalcohols, or glucose. For example, one dosage of an antibody or antigen-binding fragment described herein may be dissolved in an isotonic NaCl solution and optionally added to a larger volume of hypodermoclysis fluid prior to being injected at the proposed site of infusion. In some embodiments, the composition comprising an antibody or antigen-binding fragment described herein is provided in a solvent or dispersion medium containing, for example, water, ethanol, polyol (for example, glycerol, propylene glycol, and liquid polyethylene glycol), and suitable mixtures thereof. A composition may also contain adjuvants such as preservatives, wetting agents, emulsifying agents, and dispersing agents. Proper fluidity may be maintained, for example, by the use of a coating, such as lecithin, by the maintenance of the required particle size in the case of dispersion and by the use of surfactants.

[0165] In certain circumstances, it will be desirable to deliver an antibody or antigen-binding fragment thereof described herein or suitably formulated pharmaceutical compositions thereof disclosed herein either subcutaneously, intraocularly, intravitreally, parenterally, subcutaneously, intravenously, intracerebro-ventricularly, intramuscularly, intracranially, intrathecally, orally, intraperitoneally, or by oral or nasal inhalation, or by direct injection to one or more cells, tissues, or organs. In some embodiments, an antibody or antigen-binding fragment thereof described herein or composition thereof is injected directly into the cerebrospinal fluid of the subject. In some embodiments, direct injection of an antibody or antigen-binding fragment thereof described herein or composition thereof to human CNS is preferred, for example, delivery is performed concurrently with a surgical procedure or interventional procedure whereby access to the central nervous system tissue is provided. In general, the most appropriate route of administration will depend upon a variety of factors including the nature of the agent (e.g., its stability in the environment of the gastrointestinal tract), and/or the condition of the subject (e.g., whether the subject is able to tolerate oral administration, injection, etc.). In some embodiments, compositions are administered to a subject through only one administration route. In some embodiments, multiple administration routes may be exploited (e.g., serially, or simultaneously) for administration of the composition to a subject.

[0166] The administration of therapeutically effective amounts of the compositions of the present disclosure which comprise an antibody or antigen-binding fragment thereof described herein may be achieved by a single administration. For example, a single injection of a sufficient amount of the antibody, antigen-binding fragment thereof or composition thereof may be performed to provide therapeutic benefit to the patient undergoing such treatment. In some circumstances, it may be desirable to provide multiple or successive administrations of the antibody, antigen-binding fragment thereof or composition thereof, either over a relatively short, or a relatively prolonged period of time, as may be determined by the medical practitioner responsible for treatment. In some embodiments, administration of the antibody, antigen-binding fragment thereof or composition thereof to a subject occurs at least one time. In some embodiments, administration of the antibody, antigen-binding fragment thereof or composition thereof to a subject occurs 2, 3, 4, 5, 6, 7, 8, 9, or 10 or more times over the course of treatment.

[0167] If desired, the antibody, antigen-binding fragment thereof or composition thereof may be administered in combination with other agents as well, such as, e.g., proteins or polypeptides or various pharmaceutically active agents, including one or more administrations of therapeutic polypeptides, biologically active fragments, or variants thereof. In fact, there is virtually no limit to other components that may also be included, as long as the additional agents do not cause a significant adverse effect upon contact with the target cells or host tissues. The antibody, antigen-binding fragment thereof or composition thereof may thus be delivered along with various other pharmaceutically acceptable agents as required in the particular instance. Such agents may be purified from host cells or other biological sources, or alternatively may be chemically synthesized as described herein.

### Kits

[0168] In some aspects, the present disclosure provides a variety of kits comprising antibodies or antigen-binding fragments derived from the approaches described herein or compositions thereof.

[0169] The kits comprising an antibody or antigen-binding fragment described herein described herein may be used for a variety of purposes. In some embodiments, kits comprising an antibody or antigen-binding fragment described herein described herein may be used to treat a disease, disorder, or condition.

[0170] The kits described herein may include one or more containers housing components for performing the methods described herein, and optionally instructions for use. The components may be prepared sterilely, packaged in a syringe, and shipped refrigerated. Alternatively, they may be housed in a vial or other container for storage. A second container may have other components prepared sterilely. Alternatively, the kits may include the active agents premixed and shipped in a vial, tube, or other container. The kits may also include other components, depending on the specific application, for example, containers, cell media, salts, buffers, reagents, syringes, needles, a fabric, such as gauze, for applying or removing a disinfecting agent, disposable gloves, a support for the agents prior to administration, etc.

[0171] In some embodiments, a kit further comprises a set of instructions for using the compositions comprising an antibody or antigen-binding fragment described herein for carrying out the methods described herein. As used herein, “instructions” can define a component of instruction and/or promotion, and typically involve written instructions on or associated with packaging of this disclosure. Instructions also can include any oral or electronic instructions provided in any manner such that a user will clearly recognize that the instructions are to be associated with the kit, for example, audiovisual (e.g., videotape, DVD, etc.), Internet, and/or web-based communications, etc. The written instructions may be in a form prescribed by a governmental agency regulating the manufacture, use, or sale of pharmaceuticals or biological products, which can also reflect approval by the agency of manufacture, use or sale for animal administration. As used herein, “promoted” includes all methods of doing business including methods of education, hospital and other clinical instruction, scientific inquiry, drug discovery or development, academic research, pharmaceutical industry activity including pharmaceutical sales, and any advertising or other promotional activity including written, oral, and electronic communication of any form, associated with this disclosure. Additionally, the kits may include other components depending on the specific application, as described herein.

[0172] The kits may have a variety of forms, such as a blister pouch, a shrink-wrapped pouch, a vacuum scalable pouch, a scalable thermoformed tray, or a similar pouch or tray form, with the accessories loosely packed within the pouch, one or more tubes, containers, a box, or a bag. The kits may be sterilized after the accessories are added, thereby allowing the individual accessories in the container to be otherwise unwrapped. The kits, or any of its components, can be sterilized using any appropriate sterilization techniques, such as radiation sterilization, heat sterilization, or other sterilization methods known in the art.

### Applications of Antibodies and Antigen-Binding Fragments Thereof

[0173] In some aspects, the present disclosure relates to clinical and commercial applications of antibodies and antigen binding fragments thereof developed through the methods described herein.

[0174] In some embodiments, the antibodies and antigen binding fragments thereof developed through the methods described herein may be modified. Examples of modification include the incorporation of one or more non-canonical amino acids into the antibodies and antigen binding fragments thereof developed through the methods described herein. Amino acid modifications may occur at any position within the amino acid chemistry including, but not limited to, the amino acid side chain and the peptide bond between amino acids. In some embodiments, antibodies and antigen binding fragments thereof developed through the methods described herein may be modified with chemistries such as drug molecules. In some embodiments, antibodies and antigen binding fragments thereof may be modified with, for example, one one or more oligonucleotides, cell-penetrating peptides, or small molecules (e.g., cytotoxins, enzyme-inhibitors, etc.).

[0175] In some embodiments, the antibodies and antigen-binding fragments thereof developed through the methods described herein may be selected for due to their ability to bind pathogens. In some embodiments, said antibodies and antigen-binding fragments thereof bind to a human pathogen such as, but not limited to, a virus selected from the family of Adenoviridae, Picornaviridae, Herpesviridae, Hepadnaviridae, Coronaviridae, Flaviviridae, Retroviridae, Orthomyxoviridae, Paramyxoviridae, Papovaviridae, Polyomavirus, Poxviridae, Rhabdoviridae, and Togaviridae, a bacteria selected from the group of Mycobacterium tuberculosis, Streptococcus, Pseudomonas, Shigella, Campylobacter, and Salmonella, or a fungus species such as Candida, Aspergillus, Cryptococcus, Histoplasma, Pneumocytis, or Stachybotrus, Bacillus anthracis, Clostridium botulinum, Mycobacterium leprae, Yersinia pestis, Rickettsia prowazekii, Bartonella spp., or another organism such as a parasite that causes malaria, amoebiasis, babesiosis, giardiasis, toxoplasmosis, cryptosporidiosis, trichomoniasis, Chagas disease, leishmaniasis, African trypanosomiasis (sleeping sickness), Acanthamoeba keratitis, and primary amoebic meningoencephalitis (naegleriasis).

[0176] In some embodiments, antibodies and antigen-binding fragments thereof developed through the methods described herein may be provided on a vector and expressed in a host cell in order to enable the host cell to attach to a target. In some embodiments, the target may be a human pathogen or a diseased cell or tissue. In some embodiments, the antibodies and antigen-binding fragments thereof are used to generate a T cell expressing a chimeric antigen receptor.

[0177] In some embodiments, antibodies and antigen-binding fragments thereof developed through the methods described herein may attached to a particle, microparticle, or nanoparticle. In some embodiments, attachment of said antibodies or antigen-binding fragments thereof to a particle, microparticle, or antigen-binding fragment may be used for diagnostic purposes in a subject. In some embodiments, the particle, microparticle, or nanoparticle conjugated to the antibodies or antigen-binding fragments thereof described herein further comprise an imaging agent for detection either in vivo or ex vivo.

[0178] In some embodiments, antibodies and antigen-binding fragments thereof developed through the methods described herein may bind target cells expressing one or more cancer driver genes or genes carrying cancer driver mutations associated with increased risk of cancer. In some embodiments, the cancer driver gene may be, but is not limited to, ATM, ATR, BARD1, BRCA1, BRCA2, BRIP1, CHEK2, CDH1, NFL1, PALB2, PTEN, RAD51C, RAD51D, STK11, TP53, APC, EPCAM, MLH1, MSH2, MSH6, PMS2, MUTYH, P53, P21, NBN, CDKN2A, BAP1, HOXB13, RAS, MAP2K4, FRG1B, SPOP, CASP8, AKT1, KRAS, KDM6A, DNMT3A, U2AF1, FOXA1, FOXA2, KEAP1, RPSAP58, PPP2R1A, PIK3CA, METTL14, SMAD4, CBFB, WT1, CDKN2A, APC, FBXW7, FGFR2, FGFR3, RUNX1, KIT, BRAF, PTEN, CTCF, EGFR, CTNNB1, NFE2L2, IDH2, IDH1, FLT3, PIK3R1, VHL, NRAS, CCND1, MLL2,CDK12, ZFHX3, PTPN11, ATRX, NCOR1, STAG2, MED13, NCOA3, RHEB, ELP2, RBM10, KIAA13241, STXBP5L, LARP1, AB13P, KRAS, CCAR1, CMTR2, ASMTL, SMARCA4, RB1,KEAP1, ARID1A, MUC20, NFE2L2, RYR2, KMT2D, PIK3CA, RASA1, RBL1, FAT, MS4A14, DPPA4, CEP89, NRD1, KLHL4, and PPIP5K2.

### EXAMPLES

### Example 1

[0179] Advancements in antibody engineering technologies has lagged far behind the needs for high quality antibodies for research and medicine. Such needs are constantly expanding, fueled by rapid developments of high throughput approaches for genomic profiling and functional screens in recent years that led to the definition of increasing number of biomolecules relevant to diagnosing, monitoring and treating diseases. Animal-dependent methods for generating antibodies are widely used (1) but they are time-consuming and unpredictable (2). In vitro antibody systems based on phage display (3), yeast display (4) or ribosome display (5) could offer greater speed, throughput and reliability. However, despite their advantages, in vitro antibody generation remains under-utilized and further progress in efficiency and throughput are required (6). A strategy to engineer synthetic VHH domain antibodies (nanobodies) against hundreds to thousands of human protein targets simultaneously is described. This strategy combines a recently developed integrated cell-free antibody engineering platform, CeVICA (7), with single-cell sequencing (8) and genome-wide CRISPR/Cas9 knock-out (9) approaches to deliver highly parallel genome-scale antibody generation. The new technologies described herein should catalyze wider adoption of sequence-defined, in vitro engineered antibodies for research and medicine, and enable new capabilities for genome-scale antibody-based technologies.

### Background

[0180] Antibodies are essential reagents for research and represent a fast-growing class of therapeutics. However, commercial antibodies are often either polyclonal, and thus not sequence-defined and not renewable, or are monoclonal, but the production of multiple monoclonal antibodies is expensive and time-consuming (1) (2). A method for rapid and cost-effective generation of sequence-defined antibodies would enable the creation of new antibody-based tools.

[0181] A cell-free method for generating and screening massive antibody libraries was recently developed, consisting of a fully synthetic library with up to 10¹⁰ or 10¹¹ independent single-chain VHH nanobodies, which was described in PCT Application No. PCT/US2021/051925, which claims priority to U.S. Application Nos. 63/083,073 and 63/221,663, all three of which are incorporated by reference herein in their entirety. This method is shown in FIG. 6. For example, a linear DNA library structure is provided (FIG. 6A), wherein a nanobody sequence with randomized CDRs is controlled by a T7 promotor and is found upstream of a spacer sequence. Using ribosome display technology to produce RNA-tagged nanobodies from the random VHH (FIG. 6B), nanobodies that bound immobilized targets were selected, and high affinity neutralizing nanobodies were identified. For example, nanobodies against SARS-COV-2 spike receptor binding domain (RBD) and EGFP were successfully selected using three rounds of selection (FIG. 6C). In this example, the output was analyzed by next generation sequencing (NGS) and computational clustering by CDR sequences (FIG. 6D), which led to more than 800 distinct binding clusters. In this case, each cluster represented a predicted binder of RBD (FIG. 6E). Testing and affinity maturation of a subset of these clusters yielded potent SARS-COV-2 neutralizing nanobodies (FIG. 6F).

[0182] This small single-chain VHH domain antibody format offers good physiochemical properties and amenability to engineering. By using the cell-free display approach and ribosome display, CeVICA can screen extremely high diversity input libraries rapidly. Computational clustering of identified binder prediction enables more efficient iterative screens and optimization. The system also has the advantage that small (14 kD) single-chain nanobodies are identified that have useful properties for screening (e.g., shorter sequences) and downstream applications because, for example, they are stable with Tₘ up to 90° C.; they are feasible to scale up for production; and they are smaller to penetrate tissues. Prior methods using phage and yeast display had lower diversity (for example, around 10⁹) and slower cycles (due to the time needed to culture cells). The use of CeVICA has previously been shown to successfully engineer SARS-CoV-2 neutralizing antibodies (7).

[0183] The advantages of CeVICA can be leveraged as explained herein to develop novel integrated pipelines for simultaneous generation of antibodies against hundreds to thousands of human proteins. The comprehensive analysis of all binders in the output library permits flexible integration with high throughput sequencing technologies such as droplet-based single cell sequencing and additional computational tools that could enable greater throughput. This system is well suited for analyzing cell surface proteins, due to their critical role in cell signaling and as important therapeutic targets (10), while being versatile enough for other antigen classes such as intracellular proteins, peptides protein complexes, and peptide-MHC complexes (PMID: 9391117, PMID: 14523945, PMID: 33649166). These goals will be achieved through the following two complementary approaches.

### Antibody Generation for Diverse Antigen Classes Using Single Cell Open Reading Frame (ORF) Expression and Sequencing

[0184] This approach will create a generalizable pipeline for generating antibodies for selected targets at the scale of hundreds. For example, around 200 targets of interest can be selected, and a two-stage process can be used to first select antibodies for the targets as a pool, then map each antibody to their targets (FIGS. 1A-1C). It is anticipated that this two-stage design will minimize background noise during antibody-antigen mapping. Finally, antibodies will be validated by independent biochemical assays.

### Establish a Universal Strategy to Ectopically Express Target Proteins on CHO Cell Surface.

[0185] Around 200 target proteins or protein domains can be selected that include diverse classes such as, but not limited to, membrane proteins/domains (e.g., CD39, Tim3, CD28, CD4), intracellular proteins (e.g., STING), short peptides (as peptide-carrier protein fusion) and peptide-MHC I complexes (as a single-chain format (11)). Multi-pass transmembrane domains or domains that are not stable alone are usually excluded. Selected targets are cloned into lentiviral vectors to allow expression as artificial cell membrane proteins by cloning in-frame, a N-terminal signal peptide, a C-terminal single pass transmembrane domain or a Glycosylphosphatidylinositol (GPI) anchor and a 3xFlag affinity tag (see FIG. 1A). These constructs are assayed to confirm successful expression of the targets on the cell surface by immunostaining. In the event of suboptimal cell surface expression, different signal peptide and transmembrane domain/GPI anchor combinations can be assayed to find the most optimal format. These lentiviral constructs can also contain unique barcodes in the ORF's 3′UTR to allow reading the identity of the ORF in single cell sequencing workflows. Once complete, the ORF lentivirus constructs are pooled together and an ORF lentivirus pool is generated.

### Pooled Selection and Antibody-Antigen Mapping

[0186] Targets are produced as a pool by cells (for example CHO cells) transduced by the ORF lentivirus pool, and the target proteins can be immobilized on magnetic beads via the 3xFlag tag. Pooled antibody selection is performed using CeVICA under selection conditions optimized for high affinity binders. For example, as shown in FIG. 1B, a display complex is generated by in vitro transcription and translation of an input DNA library, followed by cold stop buffer to yield a solution of stable display complexes. These display complexes can be pre-cleared to remove off-target binders by incubating the display complexes with cells not expressing the target. The off-target binders are removed from the solution by centrifugation. The supernatant is then transferred for binder selection. Binder selection occurs by incubating the display complexes (which may be pre-cleared) with cells expressing targets, and with the removal of non-binders. The binder complexes that are bound are then collected by centrifugation, and the cell pellets collected. Binder recovery occurs by eluting the display complex RNA from the cells, purifying and concentrating the RNA library, and regenerating the DNA library by reverse-transcription and PCR. The output binder DNA library can optionally be used in a repeat process to enrich for binder complexes that bind the cells.

[0187] Successful antibody selection is confirmed by monitoring the recovered RNA yield at each selection cycle as well as enrichment of full-length antibody sequences in the output library. These metrics were shown to be early indications of successful selection (7). The selection output is used to generate computationally predicted antibody clusters and serve as a database for antibody-antigen mapping. The mapping is performed by first displaying the selection output library using ribosome display, then incubating this display complex pool with CHO cells infected by targets ORF lentivirus library at low MOI (such that most cells will only express a single ORF target) (FIG. 1C). These incubated cells are then processed by 10× 3′ expression kits to read the target expressed by each cell and the antibody sequences attached to that cell. A computational pipeline is used on these sequencing data to establish the link between antibodies and their targets. The SARS-COV-2 receptor binding domain (RBD) can be included as one of the targets to serve as an internal control and spike in previously identified RBD VHH antibody sequences (7) in the initial library. This known antibody-antigen pair will serve as a positive control for the mapping process and aid in determination of optimal parameters for the computational pipeline.

### Antibody Validation

[0188] Independent binding assays can be used to validate identified antibodies. Selected antibody sequences are synthesized, cloned and expressed in E. Coli. Three assays are well suited for use in validating binding and specificity of each antibody: 1) an automated ELISA workflow to measure both target binding and off-target binding in 96 well plates; 2)., flow cytometry for targets with existing antibodies to confirm quantitative correlation between the newly selected antibodies and existing antibodies; and 3) Bio-Layer Interferometry (BLI) to quantitatively assay antibody binding kinetics.

Simultaneous GENERATION of antibodies Against All Cell Surface Proteins Using Single Cell Sequencing and Cas9/gRNA Knock-Out (KO)

[0189] A pipeline is established to generate antibodies against all cell surface proteins expressed by a group of cells. This pipeline adopts a two-stage process (FIGS. 2B-2C). First, display complexes that bind to cells of interested are enriched in a method similar to that as described above. However, in this approach, ectopic expression of targets is not required, because the targets are cell surface proteins natively expressed by the chosen cells. Second, the expression of proteins on the target cells are either reduced or eliminated in a KO step to select for binder complexes that no longer bind to the target cells. This approach is achieved via the following steps.

### Determine Optimal Conditions and Parameters for Detecting Nanobodies that Bind Surface Proteins

[0190] Pilot studies using a nanobody library that includes hundreds of sequences that encode spike RBD-binding and EGFP-binding nanobodies, prepared as described above, can be performed prior to screening against endogenous surface proteins. In such pilot studies, the target cells can be the Jurkat T cell line (an easy to grow suspension line) expressing RBD on the surface. The lentivirus-encoded sgRNAs are introduced to delete RBD in varying fractions of cells and monitor sgRNA-mediated loss of nanobody binding with scRNA-seq of nanobody RNAs and sgRNA barcodes. The loss of binding of our established nanobodies in cells lacking RBD or EGFP on the surface should be observed (measured as a reduction in abundance of linked nanobody RNA sequences). These positive control screens can be used to tune experimental protocols (such as binding conditions to reduce non-specific binding, fraction and number of cells expressing the sgRNA needed to observe dropout of nanobody binding, sequencing depth needed for sufficient recovery of nanobody clusters) and computational pipelines (clustering algorithms based on biophysical parameters to increase power and speed, cut-off parameters for minimal size of clusters and their size fold change to maximize signal to noise ratio), with the goal of maximizing identification of positive controls across a spectrum of binding affinities and off-rates.

### Characterize Human Cell Lines Suitable for Genome Wide Surface Protein Antibody Generation

[0191] Target cells of interest are identified that natively express target proteins, such as native surface proteins (FIG. 2A). For example, three cell lines can be chosen, such as HEK293T sus, Jurkat and SH-SY5Y (target cells). These cell lines have distinct tissue of origins such that their collective cell surface expressed proteins represent a larger proportion of all surface proteins in the human genome. They are also known to be compatible with CRISPR/Cas9 and droplet-based single cell sequencing. RNA-seq can be performed on the cell lines to confirm their surface protein expression profile and to construct knock-out (KO) libraries. For example, a lentivirus knockout library can be constructed that contains shRNAs or sgRNAs for knocking out one target (FIG. 2A). A Cas9/gRNA lentiviral library (using constructs based on the CROP-seq method (12)) targeting the entire human surface proteome can also be prepared (10). The efficacy of Cas9/gRNA KO system for several well characterized cell surface proteins (such as CD28, HLA) can be assayed by immunostaining. Finally, pre-clearing cells of different origin and different surface proteome as the cell of interest can be used (FIG. 2A).

### Pooled Selection and Antibody-Antigen Mapping

[0192] In this approach, live target cells in single cell suspension serve as the solid phase with immobilized targets for pooled selection of antibodies (FIG. 2A). The same steps as in the above application are used to generate a pool of all predicted antibody clusters to be used for antibody-antigen mapping (FIG. 2B). For example, display complexes are generated by in vitro transcription and translation of an input DNA library. Starting input library sizes of up to 10¹² can be used by optimizing our existing protocol to incorporate more input DNA library amount in the initial selection cycle (which can be achieved by using larger reaction volumes). This is followed by cold stop buffer to yield a solution of stable display complexes. The display complexes can be pre-cleared by incubating them with pre-clearing cells. Cells from other species and/or cell types (e.g., hamster CHO cells, Drosophila S2 cells) can be used for the pre-clearing, to provide for pre-clearing of non-specific binders, which can be, for example, lipid/sugar binders and promiscuous binders. The nanobodies that do not bind non-specifically to cells are retained. The display complexes that bind off-target binders are removed from the solution, for example by centrifugation. The supernatant is then used in the binder selection step. The binder selection step enriches for surface binders, thereby reducing the complexity of the input library for mapping. For example, the pre-cleared library can be incubated with intact Jurkat cells and positively selected for binding nanobodies. Binder selection occurs by incubating pre-cleared display complexes with target cells. The non-binders are removed, and binder complexes that bound to the target cells are collected, for example by centrifugation where the cell pellets are collected. The binders are recovered by eluting the display complex RNA from the cells, purifying and concentrating the RNA library. The RNA library is then reverse transcribed, and PCR is used to regenerate the DNA library. These steps can be repeated on the output binder DNA library to enrich the library. The library can be monitored through multiple cycles of selection by measuring recovered RNA yield and enrichment for full-length nanobody sequences at each selection cycle, which can be predictive of successful positive selection (7). The resulting output library will thus be enriched for binders of Jurkat cells and depleted for non-specific cell binders.

[0193] Mapping is performed by first displaying the selection output library using ribosome display, then incubating this display complex pool with target cells in which expression of the protein to be mapped is reduced or eliminated. For example, CRISPR can be used to deplete specific surface proteins in individual cells and identify nanobodies that do not bind cells lacking each protein (FIG. 2C). Alternatively, CRISPRi (PMID: 23849981) or RNA interference (PMID: 21953743) can be used to reduce the level of surface proteins for mapping of nanobodies targeting these surface proteins. Specifically, target cells are infected with a Cas9/gRNA lentivirus KO library at low MOI, such as MOI<1. This will generate a cell pool with approximately one target per cell, where ideally each cell will have one surface protein KO. A binder DNA library is transcribed and translated in vitro to generate binder display complexes. The KO target cells are incubated with saturating binder complexes. These incubated cells are then processed, for example with 10× 3′ expression kits, to read the gRNA identity of each cell and the antibody/nanobody sequences of those binder complexes that attached to that cell. For each cell, the sequence of the KO RNA and the nanobody RNA are sequenced. The cells containing the same KO RNA are grouped together.

[0194] For each KO group, the co-incidence of the loss (or reduced abundance) of nanobody RNAs and the KO RNA indicates that the lost/reduced nanobodies bind to the KO surface protein. For example, a computational pipeline is used to analyze the sequencing data, in which all antibody sequences bound to cells with the same gene KO are combined and antibody clusters are generated for each gene KO. This list of antibody clusters is then compared to the selection output antibody clusters (the list prior to antibody-antigen mapping) to identify antibody clusters that are lost or reduced in size for each gene KO. These lost antibodies associated with each gene KO indicates potential binding of the antibody to the gene's encoded protein. Previously identified VHH sequence (13), such as for anti-PD-L1, can be spiked in the initial library and used as the positive control for optimization of experimental protocols and computational pipeline.

### Antibody Binding and Specificity Validation Using Computational Algorithm.

[0195] The whole surface proteome antibody screen provides a rich dataset from which antibody binding and specificity properties can be quantitatively derived. Biochemical assays, such as ELISA and BLI, can be used to characterize binding properties of a subset (for example, about 100) of identified antibodies to serve as an independent quantification dataset. The degree of loss (antibody cluster size reduction) for each gene KO is used to establish a quantitative model to predict binding strength by correlating each antibody's degree of loss with their binding properties measured by, for example, ELISA and BLI. Further, the degree of loss patterns for each antibody cluster is compared across all surface protein KOs to construct a map of specificity for each antibody. Antibodies with high degree of loss to only one surface protein KO but very low degree of loss to all other proteins KO indicates high specificity. The analysis takes into consideration that KO of one gene may interfere with the expression of other genes. These computational algorithms can provide a powerful approach to rapidly identify high quality antibodies across the surface proteome with minimal laborious experimental testing.

[0196] If the signal is not high enough using the proposed dropout screen, a positive binding mapping approach can be used. For example, epitope-tagged target proteins (or their domains) are ectopically expressed on the cell surface using an N-terminal signal peptide, C-terminal single pass transmembrane domain or GPI anchor. A pipeline similar to the above approach Aim 2 can be used to perform single cell sequencing and read out ORF barcodes and bound nanobody sequences per cell, and thus identify nanobody-target pairs. As this approach becomes more feasible through gene synthesis, synthetic gene libraries can be synthesized and expressed in cell lines of non-mammalian species such as Drosophila to reduce competition with the corresponding endogenous proteins. It is expected that thousands of cell-line specific nanobodies can be identified and many mapped to their targets with high specificity. To address the possibility that KO of a single protein may lead to loss or other proteins (e.g. complexes that depend on each component for stability or other dependencies such as trafficking or signaling) and confound mapping, single in vitro recombinant proteins can be generated and immobilized on magnetic beads for definitive mapping. For KOs that cause cell death, CRISPRi (PMID: 23849981) partial knock down or RNA interference (PMID: 21953743) will be used to allow cells to survive.

[0197] Using Ribosome Display Complex Pools as Highly Multiplex Protein Profiling Reagents

[0198] Another example of the use of the large collection of antibodies is antibody-based cell surface proteome profiling, in a process that is highly similar to CITE-seq which uses oligo conjugated antibodies. For example, a barcoded antibody pool can be generated using a nanobody DNA library that has been transcribed and translated in vitro. The result is a barcoded nanobody pool. This pool can be used to used to bind to target cells of interest, followed by high-throughput sequencing to quantify the nanobody RNA sequences and barcodes of the binding targets that bind to the target cell. An example of scheme for sequencing using Next-Generation Sequencing (NGS) of the library for nanobody-target mapping is found at FIG. 3.

### Using Whole Cell to Present Antigen on the Cell Surface for Nanobody Selection

[0199] As another example, whole cells can be used to present antigen for on the cell surface for nanobody selection. As an example, EGFP protein was expressed as an artificial cell surface protein by adding an N-terminal signal peptide and a C-terminal GPI anchor sequence (FIG. 5A). Whole cell can act as solid surface presenting antigen for selection of nanobody ribosome display complex, the receptor binding domain (RBD) of SARS-COV-2 spike protein and RBD nanobodies are used to test feasibility, EGFP can be used as negative control. For example, RBD nanobody ribo-display, as described above, was reacted with both he EGFP cells, and cells expressing RBD, and the ribo-displays that bind to the cell surface of either cell was clute (FIG. 5B). RNA from the eluant was purified and quantitated, the amount of RNA recovered, in μg, was determined.

[0200] Together, these approaches provide for high throughput antibody generation for diverse antigen types at a range of scales. These approaches allow highly parallel antibody engineering at low cost, create a large collection of antibodies that enable antibody-based cell surface proteome profiling (e.g., using CITE-seq), offer the potential to generate antibodies against “difficult” targets (e.g., glycan moieties and other post-translational modifications including, but not limited to, hydroxylation, farnesylation, isofarnesylation, lipidation, addition of a linker for conjugation or functionalization, phosphorylation, de-phosphorylation, acetylation, de-acetylation, SUMOylation, glycosylation, nitrosylation, methylation, and ubiquitination), and pave the path towards antibody generation for all proteins in the human genome using the Cas9/gRNA based strategy.

### REFERENCES

[0201] 1. A. Gray, A R. M. Bradbury, A. Knappik, A. Plückthun, C. A. K. Borrebaeck, S. Dübel, Animal-free alternatives and the antibody iceberg. Nat. Biotechnol. 38, 1234-1239 (2020).
[0202] 2. A. C. Gray, A. R. M. Bradbury, A. Knappik, A. Plückthun, C. A. K. Borrebaeck, S. Dübel, Animal-derived-antibody generation faces strict reform in accordance with European Union policy on animal use. Nat. Methods. 17, 755-756 (2020).
[0203] 3. J. Huo, A. Le Bas, R. R. Ruza, H. M. E. Duyvesteyn, H. Mikolajek, T. Malinauskas, T. K. Tan, P. Rijal, M. Dumoux, P. N. Ward, J. Ren, D. Zhou, P. J. Harrison, M. Weckener, D. K. Clare, V. K. Vogirala, J. Radecke, L. Moynié, Y. Zhao, J. Gilbert-Jaramillo, M. L. Knight, J. A. Trec, K. R. Buttigieg, N. Coombes, M. J. Elmore, M. W. Carroll, L. Carrique, P. N. M. Shah, W. James, A. R. Townsend, D. I. Stuart, R. J. Owens, J. H. Naismith, Neutralizing nanobodies bind SARS-COV-2 spike RBD and block interaction with ACE2. Nat. Struct. Mol. Biol. (2020), doi: 10.1038/s41594-020-0469-6.
[0204] 4. E. T. Boder, K. D. Wittrup, Yeast surface display for screening combinatorial polypeptide libraries. Nat. Biotechnol. 15, 553-557 (1997).
[0205] 5. J. Hanes, A. Plückthun, In vitro selection and evolution of functional proteins by using ribosome display. Proc. Natl. Acad. Sci. U. S. A. 94, 4937-4942 (1997).
[0206] 6. A. R. M. Bradbury, S. Sidhu, S. Dübel, J. McCafferty, Beyond natural antibodies: The power of in vitro display technologies. Nat. Biotechnol. 29, 245-254 (2011).
[0207] 7. Chen, X., Gentili, M., Hacohen, N. et al. A cell-free nanobody engineering platform rapidly generates SARS-COV-2 neutralizing nanobodies. Nat. Commun. 12, 5506 (2021). https://doi.org/10.1038/s41467-021-25777-z.
[0208] 8. E. Z. Macosko, A. Basu, R. Satija, J. Nemesh, K. Shekhar, M. Goldman, I. Tirosh, A. R. Bialas, N. Kamitaki, E. M. Martersteck, J. J. Trombetta, D. A. Weitz, J. R. Sanes, A. K. Shalck, A. Regev, S. A. McCarroll, Highly parallel genome-wide expression profiling of individual cells using nanoliter droplets. Cell. 161, 1202-1214 (2015).
[0209] 9. O. Shalem, N. E. Sanjana, E. Hartenian, X. Shi, D. A. Scott, T. S. Mikkelsen, D. Heckl, B. L. Ebert, D. E. Root, J. G. Doench, F. Zhang, Genome-Scale CRISPR-Cas9 Knockout Screening in Human Cells. Science. 343, 84-87 (2014).
[0210] 10. D. Bausch-Fluck, U. Goldmann, S. Müller, M. van Oostrum, M. Müller, O. T. Schubert, B. Wollscheid, The in silico human surfacecome. Proc. Natl. Acad. Sci. U. S. A. 115, E10988-E10997 (2018).
[0211] 11. Y. Y. L. Yu, N. Netuschil, L. Lybarger, J. M. Connolly, T. H. Hansen, Cutting Edge: Single-Chain Trimers of MHC Class I Molecules Form Stable Structures That Potently Stimulate Antigen-Specific T Cells and B Cells. J. Immunol. 168, 3145-3149 (2002).
[0212] 12. P. Datlinger, A. F. Rendeiro, C. Schmidl, T. Krausgruber, P. Traxler, J. Klughammer, L. C. Schuster, A. Kuchler, D. Alpar, C. Bock, Pooled CRISPR screening with single-cell transcriptome readout. Nat. Methods. 14, 297-301 (2017).
[0213] 13. J. R. Ingram, M. Dougan, M. Rashidian, M. Knoll, E. J. Keliher, S. Garrett, S. Garforth, O. S. Blomberg, C. Espinosa, A. Bhan, S. C. Almo, R. Weissleder, H. Lodish, S. K. Dougan, H. L. Plocgh, PD-L1 is an activation-independent marker of brown adipocytes. Nat. Commun. 8 (2017), doi: 10.1038/s41467-017-00799-8.
[0214] 14. Sarkizova S, Klaeger S, Le P M, Li L W, Oliveira G, Keshishian H, Hartigan C R, Zhang W, Braun D A, Ligon K L, Bachireddy P, Zervantonakis I K, Rosenbluth J M, Ouspenskaia T, Law T, Justesen S, Stevens J, Lane W J, Eisenhaure T, Lan Zhang G, Clauser K R, Hacohen N, Carr S A, Wu C J, Keskin D B. A large peptidome dataset improves HLA class I epitope prediction across most of the human population. Nat Biotechnol. 2020 February;38 (2): 199-209. doi: 10.1038/s41587-019-0322-9.

### Example 2

[0215] The above-referenced CeVICA platform, which is an integrated VHH antibody discovery platform that rapidly and reliably generated hundreds of VHHs against one antigen, was used to generate VHHs against the receptor binding domain of SARS-COV-2 spike (RBD) and optimized one VHH to become a potent virus neutralization agent (FIGS. 6, 7). A platform was developed that can perform antibody selection against multiple antigens simultaneously in one mixed pool. This platform is composed of two stages: First, pooled antibody selection yields a large pool of antibodies with each antibody likely binding to at least one antigen in a pool of antigens. Second, antibody-antigen mapping finds the cognate antigen of each of the antibodies discovered by the pooled antibody selection in high-throughput (see FIG. 8). This platform is adaptable with different antibody formats, such as VHH and scFV, and different types of antigens, such as folded protein domains, short peptides, membrane proteins, protein-protein or protein-peptide complexes, and post-translational modifications. This Examples provides a proof-of-principle by generating and mapping VHH against a collection of 27 antigens.

[0216] To prepare antigens for VHH selection, the 27 antigens were overexpressed in HEK293T cells as cell surface membrane proteins, among which 20 protein domains from CD4, CD3E, CD28, CD19, CD25, CD45, PD1, PDL1, CTLA4, TIM3, UBE3A, ILIR2, CD14, CD177, IL7R, IL2, AR, CDH2, HER2, STING1 were expressed on the cell surface by adding a N-terminal signal peptide and C-terminal GPI anchor, 7 GPCRs were expressed as full-length protein or with an additional N-terminal signal peptide. RBD and EGFP were expressed on the cell surface by adding a N-terminal signal peptide and C-terminal GPI anchor and used as controls (Tables 2 and 3).

[0217] Whether ribosome display complex is compatible with compartmentalization (i.e., separation of a solution of a larger volume into compartments of smaller volumes such as generating a solution comprising compartments like water-in-oil droplets via microfluidics or dispensing a solution into compartments like microwells on a plate). and sequencing by a commercially available single cell sequencing system from 10x Genomics was tested. A ribosome display pool was generated using a mixture of four VHH-spacer DNA, among which two VHH, SR6v7 and SR1 (see PMID: 34535642), binds RBD. with SR6v7 having a higher affinity than SR1. The other two VHH, GP6 (see PMID: 34535642), GP3k1k (see PMID: 20010839), bind EGFP. This four VHH ribosome display pool was incubated with a pool of cells expressing RBD and cells expressing EGFP on the surface. The VHH RNA associated on the cells and the antigen transcripts expressed by the cells were quantified by the 10x Genomics droplet system using reverse transcription, PCR, and illumina sequencing. Quantification of

[0218] VHH and antigen transcripts in a droplet was based on UMI count of VHH reads and antigen transcript reads that contain the 10× Barcode which uniquely labels the droplet compartment (compartment barcodes). Mostly anti-RBD VHHs in compartments containing only RBD cells were observed (FIG. 9, top), and mostly anti-EGFP VHHs in compartments containing only EGFP cells were observed (FIG. 9, bottom). Some compartments showed both EGFP and RBD transcripts (FIG. 9, middle), which could have resulted from multiple cells entering one compartment, and these compartments showing a more even mixture of anti-RBD and anti-EGFP VHHs compared to the compartments containing only one antigen transcript. In addition, the higher affinity anti-RBD VHH, SR6v7, was consistently detected at higher quantities than SR1 in all compartments, indicating that the quantification workflow faithfully reports affinity related information. Overall, these results show ribosome display complex is fully compatible with compartmentalization and sequencing.

[0219] Performed pooled VHH selection on a pool of cells expressing the 27 antigens on the surface, and an E. coli ribosomal RNA band was observed in recovered RNA from the fifth iteration, a strong indication that VHH selection was successful. To perform VHH-antigen mapping, the output DNA library from the fifth iteration was mixed with SR6v7 and SR1 anti-RBD positive control VHH-spacer DNA (see Materials and Methods, below), and this DNA mixture was used for generating ribosome display pool. The ribosome display pool was then incubated with a pool of cells with each one expressing one of the 27 antigens plus RBD expressing cells (as a positive control). The cells in solution were then compartmentalized, sequenced and analyzed (see Materials and Methods, below). The distribution of the positive control VHH over the 28 antigens was checked, and it was found that the two anti-RBD VHH were mainly present on RBD cells (FIGS. 10A and 10B), with the higher affinity SR6v7 having 89% on RBD cells (FIG. 10B), while SR1 having 37% on RBD cells (FIG. 10A). Both VHH showed some presence on other antigen expressing cells, and these lower levels may be due to non-specific binding or background signal. This analysis generated values that correlate with VHH-antibody affinity (count per cell) and specificity (fraction of VHH on its cognate antigen expressing cells).

[0220] The distribution of other VHHs from the pooled VHH selection output was also evaluated. All VHHs were clustered based on their CDR sequence similarity and calculated their cell number normalized fraction on antigen (see Materials and Methods, below), and thousands of clusters were found that showed similar distribution characteristics as the two positive control anti-RBD VHHs but towards a different antigen. Among the 22 example VHH clusters (FIG. 11), some showed higher specificity, such as clusters 8 and 20, while some others showed lower specificity, such as clusters 5 and 22. An example of off-target binder cluster, cluster 1, was also shown which binds cells expressing different antigens at similar levels, and its true cognate antigen may be a natively expressed surface protein by HEK293T cells.

[0221] These results demonstrated the feasibility of parallel antibody discovery and validation in vitro at high throughput by combining in vitro display and single cell sequencing. Our technology platform described in this study could power large scale antibody discovery and validation efforts, leading to significant acceleration and cost-reduction in the development of antibody dependent applications.

### Materials and Methods

### Constructs and DNA

[0222] DNA encoding antigens (amino acid sequences were shown in Table 1) were obtained by gene synthesis (Integrated DNA Technologies) and cloned into pTRIP vector with C-terminal DNA barcode sequence unique for each antigen and the binding sequence of 10× Genomics Capture Sequence 2 (5′-3′: GCTCACCTATTAGCGGCTAAGG) by digestion with restriction enzyme and ligation with T4 DNA ligase. DNA encoding VHH (SR6v7: anti-RBD, SR1: anti-RBD, GP6: anti-EGFP, GP3k1k: anti-EGFP) in frame with C-terminal spacer for ribosome display (see PMID: 34535642) containing the 10x Genomics Capture sequence 1 (5′-3′: GCTTTAAGGCCGGTCCTAGCAA) were obtained by gene synthesis and cloned into pBx1vector (pBx1-T7 promoter-VHH-spacer, amino acid sequences of VHHs are shown in Table 4) by Gibson assembly (NEBuilder® HiFi DNA Assembly Master Mix, New England Biolabs). The pBx1-T7 promoter-VHH-Spacer plasmids were used as template in PCR reactions with DNA recovery primer pair (see PMID: 34535642) to generate positive control VHH-spacer DNA, the PCR reactions were purified using NucleoSpin Gel and PCR Clean-Up Kit (Takara). Cell culture

[0223] HEK293T cells were cultured in DMEM, 10% FBS (ThermoFisher Scientific), PenStrep (ThermoFisher Scientific) at 37° C. with 5% CO₂. To produce lentivirus, HEK293T cells were seeded at 0.8×10⁶ cells per well in a 6 well plate and were transfected the same day with TransIT-293 Transfection Reagent and a mix of DNA containing 1 μg pTRIP vector expressing antigen(s), 0.7 μg psPAX2 and 0.3 μg pCMV-VSV-G. Lentiviral particles were collected 48 hours post transfection by collecting culture media from transfected well, then centrifuged at 4000 rpm for 5 minutes at room temperature, after which supernatants containing lentiviral particles were collected. To generate stable cell line by lentivirus transduction, HEK293T cells were seeded at 0.8×10⁶ cells per well in a 6 well plate and transduced by adding 50 μl virus solution to the well on the same day, 48 hours after transduction the culture media were discarded and transduced cells were selected in culture media containing 2 μg/ml puromycin for 48 hours, after which cells were maintained in culture media without puromycin.

### VHH Selection Against Whole Cells

[0224] Whole cells for VHH selection were prepared by removing culture media from cell, then resuspending cells in PBS, then centrifuging at 400g for 2 minutes at 4° C. VHH selection were performed by iterations of first preparing input library ribosome display pool as described previously (see PMID: 34535642), then incubating ribosome display pool solution with cells not expressing target antigens, then transfer supernatant to cells expressing target antigens, ribosome display complexes bound to cells expressing target antigens were recovered by incubating cells in PBS solution containing 5 mM EDTA and 0.1 μg/μl Bovine Serum Albumin for 5 minutes, RNA were extracted from the eluent using Monarch RNA Cleanup Kit (New England Biolabs).

### VHH-Antigen Mapping: Compartmentalization

[0225] Ribosome display pool solution was incubated with cells expressing antigen on their cell surface for 1 hour at 4° C., the cells were washed three times and resuspended at a concentration of 400 cells/μl. 43.2 μl of the cell suspension was loaded on to Chromium Next GEM Chip G (10x Genomics) according to the Chromium Next GEM Single Cell 3′ Reagent Kits v3.1 (10x Genomics) manual and cells with bound ribosome display complexes were compartmentalized in water-in-oil droplets using the Chromium Controller (10x Genomics) followed by reverse transcription. The reverse transcription cleanup product containing cDNA of VHH RNA and antigen RNA transcripts was used as template in PCR to selectively amplify a region of VHH cDNA covering all three CDRs and a region of antigen cDNA covering the DNA barcode sequence. The PCR products were purified and quantified for sequencing by illumina Miseq.

[0226] To test anti-RBD and anti-EGFP positive control VHH against surface RBD expression cells and surface EGFP expression cells, equal mass mixtures of SR6v7-spacer, SR1-spacer, GP6-spacer, GP3k1k-spacer DNA was used for generating ribosome display pool. For VHH-antigen mapping of VHHs obtained by VHH selection against whole cells, the selection output DNA library from VHH selection against whole cells were mixed with anti-RBD positive control VHH-spacer DNA at mass ratio of 350 ng selection output DNA library to 0.75 ng positive control VHH-spacer DNA, and this DNA mixture was used for generating ribosome display pool.

### VHH-Antigen Mapping: Sequencing and Analysis

[0227] Sequencing library was sequenced on illumina Miseq using MiSeq Reagent Micro Kit v2 (300-cycles) (illumina). The obtained reads were first separated into VHH reads and antigen DNA barcode reads using their associated 10x Genomics capture sequence. Reads with duplicated Unique Molecular Identifier (UMI) were removed such that only reads with unique UMI were used in the downstream analysis to ensure reads count equals UMI count. The antigen DNA barcode reads were used to assign antigen identity to each compartment (droplet) through the 10× Barcode (which uniquely label each compartment) in the antigen DNA barcode reads. The VHH reads were clustered by their CDR sequence similarity as described previously (see PMID: 34535642), each VHH read was assigned to a compartment through the 10×Barcode in the read, the antigen present in the compartment were assigned to the VHH read. For each VHH cluster, the count of its member sequence over all the antigens included in the experiment were calculated, the count on each antigen is normalized by compartment number by dividing the count by the number of compartments having the antigen. Under the assumption that each compartment includes one cell, this compartment number normalization was referred to as cell number normalized and the compartment normalized count was referred to as count per cell. The count per cell values over all antigens for each VHH cluster was used to calculate the fraction on antigen for the VHH cluster.

[0228] SEQUENCES

Lengthy table referenced here
US20250012808A1-20250109-T00001
Please refer to the end of the specification for access instructions.

Lengthy table referenced here
US20250012808A1-20250109-T00002
Please refer to the end of the specification for access instructions.

Lengthy table referenced here
US20250012808A1-20250109-T00003
Please refer to the end of the specification for access instructions.

Lengthy table referenced here
US20250012808A1-20250109-T00004
Please refer to the end of the specification for access instructions.

### EQUIVALENTS AND SCOPE

[0229] In the articles such as “a,” “an,” and “the” may mean one or more than one unless indicated to the contrary or otherwise evident from the context. Embodiments or descriptions that include “or” between one or more members of a group are considered satisfied if one, more than one, or all of the group members are present in, employed in, or otherwise relevant to a given product or process unless indicated to the contrary or otherwise evident from the context. The invention includes embodiments in which exactly one member of the group is present in, employed in, or otherwise relevant to a given product or process. The invention includes embodiments in which more than one, or all of the group members are present in, employed in, or otherwise relevant to a given product or process.

[0230] Furthermore, the disclosure encompasses all variations, combinations, and permutations in which one or more limitations, elements, clauses, and descriptive terms from one or more of the listed claims is introduced into another claim. For example, any claim that is dependent on another claim can be modified to include one or more limitations found in any other claims that is dependent on the same base claim. Where elements are presented as lists, e.g., in Markush group format, each subgroup of the elements is also disclosed, and any clement(s) can be removed from the group. It should it be understood that, in general, where the invention, or aspects of the invention, is/are referred to as comprising particular elements and/or features, certain embodiments of the disclosure or aspects of the disclosure consist, or consist essentially of, such elements and/or features. For purposes of simplicity, those embodiments have not been specifically set forth in haec verba herein. It is also noted that the terms “comprising” and “containing” are intended to be open and permits the inclusion of additional elements or steps. Where ranges are given, endpoints are included. Furthermore, unless otherwise indicated or otherwise evident from the context and understanding of one of ordinary skill in the art, values that are expressed as ranges can assume any specific value or subrange within the stated ranges in different embodiments of the invention, to the tenth of the unit of the lower limit of the range, unless the context clearly dictates otherwise.

[0231] This application refers to various issued patents, published patent applications, journal articles, and other publications, all of which are incorporated herein by reference. If there is a conflict between any of the incorporated references and the instant specification, the specification shall control. In addition, any particular embodiment of the present invention that falls within the prior art may be explicitly excluded from any one or more of the embodiments. Because such embodiments are deemed to be known to one of ordinary skill in the art, they may be excluded even if the exclusion is not set forth explicitly herein. Any particular embodiment of the invention can be excluded from any embodiment, for any reason, whether or not related to the existence of prior art.

[0232] Those skilled in the art will recognize or be able to ascertain using no more than routine experimentation many equivalents to the specific embodiments described herein. The scope of the present embodiments described herein is not intended to be limited to the above Description, but rather is as set forth in the appended embodiments. Those of ordinary skill in the art will appreciate that various changes and modifications to this description may be made without departing from the spirit or scope of the present invention, as defined in the following claims.

### INCORPORATION BY REFERENCE

[0233] The present application refers to various issued patent, published patent applications, scientific journal articles, and other publications, all of which are incorporated herein by reference. The details of one or more embodiments of the invention are set forth herein. Other features, objects, and advantages of the invention will be apparent from the Detailed Description, the Figures, the Examples, and the Claims

### ENUMERATED EMBODIMENTS

[0234] The following embodiments are within the scope of the present disclosure. Furthermore, the disclosure encompasses all variations, combinations, and permutations of these embodiments in which one or more limitations, elements, clauses, and descriptive terms from one or more the listed embodiments is introduced into another listed embodiment in this section. For example, any listed embodiment that is dependent on another embodiment can be modified to include one or more limitations found in any other listed embodiment in this section that is dependent on the same base embodiment. Where elements are presented as lists, e.g., in Markush group format, each subgroup of the elements is also disclosed, and any element(s) can be removed from the group. It should be understood that, in general, where the disclosure, or aspects of the disclosure, is/are referred to as comprising particular elements and/or features, certain embodiments of the invention or aspects of the invention consist, or consist essentially of, such elements and/or features. It is also noted that the terms “comprising” and “containing” are intended to be open and permits the inclusion of additional elements or steps. Where ranges are given, endpoints are included. Furthermore, unless otherwise indicated or otherwise evident from the context and understanding of one of ordinary skill in the art, values that are expressed as ranges can assume any specific value or sub-range within the stated ranges in different embodiments of the invention, to the tenth of the unit of the lower limit of the range, unless the context clearly dictates otherwise.

[0235] 1. A method for obtaining a plurality of cognate antibodies or cognate antigen binding fragments that bind to their cognate binding partners present on a plurality of target cells comprising:
[0236] (a) incubating a plurality of antibodies or antigen binding fragments with a plurality of target cells comprising one or more binding partners under conditions that allow for binding to the binding partners;
[0237] (b) collecting one or more antibodies or antigen binding fragments that bound to their respective cognate binding partner;
   wherein the plurality of cognate antibodies or cognate antigen binding fragments that bind to their respective cognate binding partners are obtained.

[0238] 2. The method of embodiment 1, wherein the plurality of antibodies or antigen binding fragments is obtained by
[0239] (aa) incubating a preliminary plurality of antibodies or antigen binding fragments with a non-target cell population under conditions that allow for binding of one or more antibodies or antigen binding fragments to the non-target cell population;
[0240] (bb) collecting one or more antibodies or antigen binding fragments that did not bind to the non-target cell population in (aa),
   wherein the plurality of antibodies or antigen binding fragments is obtained.

[0241] 3. The method of embodiment 2, wherein the non-target cells do not express, or express lower levels as compared to the target cells of, cognate binding partners.

[0242] 4. The method of any one of embodiments 1-3, wherein the target cells are live single cells in suspension.

[0243] 5. The method of any one of embodiments 1-3, wherein the target cells are fixed using fixation reagent such as formaldehyde.

[0244] 6. The method of any one of embodiments 1-5, wherein the target cells are one or more of a T cell population, a kidney cell population or a bone marrow cell population.

[0245] 7. The method of any one of embodiments 1-5, wherein the target cells are blood cells.

[0246] 8. The method of any one of embodiments 1-5, wherein the target cells are cancer cells.

[0247] 9. The method of any one of embodiments 1-5, or 8, wherein the target cells are leukemia cells or neuroblastoma cells.

[0248] 10. The method of any one of embodiments 1-5, 8, or 9, wherein the target cells are leukemic T-cell lymphoblasts.

[0249] 11. The method of any one of embodiments 1-5, wherein the target cells are Jurkat cells, HEK-293 cells, SH-SY5Y cells, or CHO cells.

[0250] 12. The method of any one of embodiments 1-11, wherein the target cells are cultured for 1 day to 14 days.

[0251] 13. The method of embodiment 2 or 3, wherein the non-target cells are phylogenetically distant from the target cells.

[0252] 14. The method of either embodiment 2 or 3, wherein the non-target cells and the target cells are from different organs.

[0253] 15. The method of any one of embodiments 1-14, wherein collecting the one or more antibodies or antigen binding fragments comprises the steps of (1) incubating the cells in a buffer comprising chelating agents, and (2) retaining the supernatant after fractionation.

[0254] 16. The method of embodiment 15, wherein the chelating agent is EDTA or EGTA.

[0255] 17. The method of any one of embodiments 1-16, wherein the target cell expresses one or more cancer driver genes and/or genes carrying cancer driver mutations, and the cognate binding partners are induced by the cancer driver genes and/or genes carrying cancer driver mutations.

[0256] 18. A method for the identification of one or more cognate antibodies or cognate antigen binding proteins as matching to one or more cognate binding partners, the method comprising:
[0257] (a) providing a population of cells that express cognate binding partners;
[0258] (b) disrupting and/or decreasing the expression of one or more cognate binding partners in the cells of the population; and
[0259] (c) incubating the cell population in (b) with the plurality of cognate antibodies or cognate antigen binding fragments obtained in any one of embodiments 1-17 under conditions that allow for binding of cognate antibodies or cognate antigen binding fragments to their respective cognate binding partners;
   wherein the one or more cognate antibodies or cognate antigen binding fragments is matched to their respective cognate binding partner if their binding to the cell in which the cognate binding partner is disrupted and/or decreased as compared to the binding to the non-disrupted target cells.

[0260] 19. The method of 18, wherein the expression of the respective cognate binding partner is disrupted using clustered regularly interspaced short palindromic repeats (CRISPR).

[0261] 20. The method of embodiment 19, wherein the cell also expresses a gene editing nuclease.

[0262] 21. The method of 20, wherein the gene editing nuclease is an endonuclease.

[0263] 22. The method of embodiment 20, wherein the gene editing endonuclease is Cas9.

[0264] 23. The method of any one of embodiments 18-22, further comprising contacting the cell with a ribonucleic acid that is a single-guide RNA (sgRNA).

[0265] 24. The method of embodiment 18, further comprising contacting the cell with a ribonucleic acid which is either a small interfering RNA (siRNA) or a short hairpin RNA (shRNA), thereby knocking-down the expression of the respective cognate binding partner in the cell.

[0266] 25. The method of either embodiment 23 or 24, wherein the cognate antibodies or cognate antigen binding fragments are linked to nucleic acids containing their respective coding sequences.

[0267] 26. The method of embodiment 25, wherein the ribonucleic acid and the nucleic acid encoding the cognate antibody or cognate antibody binding fragment are sequenced by single cell sequencing.

[0268] 27. The method of any one of embodiments 23-26, wherein the ribonucleic acid sequences are used to identify the cognate binding partner with disrupted expression in the cell.

[0269] 28. The method of any one of embodiments 23-27, wherein the cell is contacted with plurality of sgRNAs or shRNAs at a multiplicity of infection (MOI) of 0.2, 0.3, 0.4, 0.5, 0.6, 0.7, 0.8 or 0.9.

[0270] 29. The method of embodiment 28, wherein the plurality of sgRNAs or shRNAs is introduced into the cell through lentiviral transduction.

[0271] 30. The method of embodiment 28, wherein the plurality of sgRNAs or shRNAs is introduced into the cell through transformation, transfection, or electroporation.

[0272] 31. The method of embodiment 28, wherein the plurality of sgRNAs or shRNAs comprises 100 to 100,000 different ribonucleic acids encoding different sgRNAs or shRNAs that target expression of different genes encoding different target proteins or target protein domains.

[0273] 32. A method for the identification of a plurality of cognate antibodies or cognate antigen binding fragments as matching to one or more cognate binding partners, the method comprising:
[0274] (a) introducing into a population of cells a plurality of nucleic acids encoding a plurality of binding partners, which result in expression of a plurality of binding partners on the surface of the cells;
[0275] (b) incubating the cells obtained in (a) with the plurality of cognate antibodies or cognate antigen binding fragments obtained in any one of embodiments 1-17 under conditions that allow for binding to the plurality of cognate antibodies or cognate antigen binding fragments; and
   wherein the one or more cognate antibodies or cognate antigen binding fragments is matched to their respective cognate binding partner if their binding to the cell in which the cognate binding partner is introduced is increased as compared to the binding to the target cells not introduced with the cognate binding partner.

[0276] 33. The method of embodiment 32, wherein the cognate binding partner is determined by single-cell sequencing of nucleic acids encoding cognate binding partners and cognate antibodies or cognate antigen binding fragments.

[0277] 34. The method of any one of embodiments 1-33, wherein the cognate antibody or cognate antigen binding fragments are clustered computationally.

[0278] 35. The method of embodiment 34, wherein a cluster size of a cognate antibody or cognate antigen binding fragment cluster is assessed by counting the number of sequences in the cluster.

[0279] 36. The method of embodiment 35, wherein increased or decreased binding of the cognate antibody or cognate antigen binding fragment is determined by an increased or decreased cluster size of the cluster representing the cognate antibody or cognate antigen binding fragment.

[0280] 37. The method of embodiment 36, wherein the cluster is normalized relative to the total sequence number to obtain a relative cluster size.

[0281] 38. The method of any one of embodiments 1-37, wherein the antibodies or antigen binding fragments are linked to nucleic acids containing their respective coding sequences.

[0282] 39. The method of embodiment 38, wherein linking of the antibodies or antigen binding fragments is achieved by ribosome display complexes comprising antibodies or antigen binding fragments, nucleic acids containing coding sequences for the antibodies or antigen binding fragments, and ribosomes.

[0283] 40. The method of embodiment 39, wherein the nucleic acids containing coding sequence are RNA.

[0284] 41. The method of either embodiment 39 or 40, wherein the ribosomes are from eukaryotic cells.

[0285] 42. The method of either embodiment 39 or 40, wherein the ribosomes are from prokaryotic cells.

[0286] 43. The method of any one of embodiments 1-42, wherein the cognate binding partners are proteins.

[0287] 44. The method of any one of embodiment 1-43, wherein the cognate binding partner proteins are natively expressed proteins.

[0288] 45. The method of any one of embodiment 1-44, wherein the cognate binding partner proteins are expressed by the cells by introducing nucleic acids containing the coding nucleic acid sequences for the proteins into the cells.

[0289] 46. The method of embodiment 43, wherein the proteins have post-translational modifications.

[0290] 47. The method of either embodiment 44 or 46, wherein the protein is part of a protein complex.

[0291] 48. The method of any one of embodiments 1-47, wherein the respective cognate binding partners comprise a lipid group or a sugar group.

[0292] 49. The method of any one of embodiments 1-42, wherein the respective cognate binding partner is not a protein.

[0293] 50. The method of any one of embodiments 1-42, wherein the respective cognate binding partner is a lipid or a sugar.

[0294] 51. The method of any one of embodiments 1-50, wherein the respective cognate binding partner is from a mammal.

[0295] 52. The method of any one of embodiments 1-51, wherein the respective cognate binding partner is from a mouse or a human.

[0296] 53. The method of any one of embodiments 1-48, 51, or 52, wherein the respective cognate binding partner is a cell surface protein.

[0297] 54. The method of any one of embodiments 1-48, 51, or 52, wherein the respective cognate binding partner is a membrane protein or membrane protein domain, an intracellular protein, a cytosolic protein, or a nuclear protein.

[0298] 55. The method of any one of embodiments 1-42, wherein the respective cognate binding partner is a peptide.

[0299] 56. The method of embodiment 55, wherein the peptide is 2 amino acids to 15 amino acids in length.

[0300] 57. The method of either embodiment 55 or 56, wherein the peptide is part of a peptide-carrier protein fusion.

[0301] 58. The method of any one of embodiment 55-57, wherein the peptide is part of a peptide-major histocompatibility complex (MHC) class I complex.

[0302] 59. The method of any one of embodiments 1-48, 51, or 52, wherein the respective cognate binding partner is a protein that mediates cell-to-cell interactions.

[0303] 60. The method of any one of embodiments 1-48, 51 or 52, wherein the respective cognate binding partner is a protein that is overexpressed in in cancer cells or a tumor.

[0304] 61. The method of any one of embodiments 1-48, 51 or 52, wherein the respective cognate binding partner is an ecto −nucleoside triphosphate diphosphohydrolase 1, E-NTPDasel (CD39), a T cell immunoglobulin and mucin domain-3 (Tim3), a cluster of differentiation 28 (CD28), a cluster of differentiation 4 (CD4), or a stimulator of interferon gene (STING).

[0305] 62. The method of any one of embodiments 1-61, wherein the cognate antibody or cognate antigen binding fragment has an affinity for the respective cognate binding partner of a KD of less than 10 μM.

[0306] 63. The method of any one of embodiments 1-62, wherein the respective cognate binding partner is a cancer drug target or a cancer immunotherapy target.

[0307] 64. A method for the detection of cognate binding partners in a sample comprising:
[0308] (a) incubating a sample with a plurality of ribosome display complexes, wherein the ribosome display complexes comprise antibodies or antigen binding fragments, nucleic acids containing coding sequences for the antibodies or antigen binding fragments, and ribosomes, under conditions that allow for binding of the plurality of cognate antibodies or cognate antigen binding fragments to the sample;
[0309] (b) detecting the ribosome display complexes that bound to the sample; and
[0310] (c) identifying cognate antibodies or cognate antigen binding fragments that bound to the sample, thereby detecting the cognate binding partners in the sample.

[0311] 65. The method of embodiment 64, wherein at least one nucleic acid contains a unique barcode in the open reading frame (ORF).

[0312] 66. The method of any one of embodiments 1-65, wherein the cognate antibodies or cognate antigen binding fragments are cognate nanobodies.

[0313] 67. The method of any one of embodiments 1-65, wherein the cognate antibody or cognate antigen binding fragment is a variable domain of the heavy chain (VHH).

[0314] 68. The method of any one of embodiments 1-65, wherein the cognate antibody or cognate antigen binding fragment is modified to alter stability, in vivo half-life, neutralizing activity and/or dimerization.

[0315] 69. The method of any one of embodiments 1-65, wherein the cognate antibody or cognate antigen binding fragment is a fusion protein.

[0316] 70. The method of any one of embodiments 1-65, wherein the cognate antibody or cognate antigen binding fragment is fused to another antibody or antibody fragment, Fc domain, antigen binding domain, glutathione S-transferase (GST), and/or serum albumin.

[0317] 71. The method of any one of embodiments 1-70, wherein the respective cognate binding partner is an antigen.

[0318] 72. The method of embodiment 64, wherein the sample is a population selected from the group of single cells, tissue slices, organs, or organisms.

[0319] 73. The method of embodiment 65, wherein step (b) and/or step (c) is achieved by sequencing the barcodes.

[0320] 74. The method of any of embodiments 65-73, wherein the barcodes are the nucleic acid sequence of CDR1 or CDR2 or CDR3 of the cognate antibodies or cognate antigen binding fragments.

[0321] 75. The method of embodiment 64, wherein step (b) is achieved by using secondary antibodies.

[0322] 76. The method of embodiment 64, wherein step (b) is achieved by fluorescence in situ hybridization.

[0323] 77. The method of any of embodiments 1-76, wherein a plurality of nucleic acids encoding the cognate antibodies or cognate antigen binding fragments is used to determine a surface proteome of a cell in the target cell population.

[0324] 78. The method of any of embodiments 1-76, wherein a surface proteome of a cell in the target cell population is determined using flow cytometry, imaging, proteomic analysis or functional analysis.

[0325] 79. The method of any of embodiments 1-78, further comprising synthesizing one or more sequences from one or more clusters of cognate antibodies or antigen binding fragments for cloning of the respective genes and testing the respective proteins.

[0326] 80. The method of any one of embodiments 1-79, wherein the cognate antibodies or cognate antigen binding fragments are allowed to bind to their respective cognate binding partners in the presence of ribonuclease inhibitors.

[0327] 81. The method of embodiment 80, wherein the ribonuclease inhibitor is a protein or a chemical.

[0328] 82. The method of embodiment 80, wherein the ribonuclease inhibitor is Ribonucleoside Vanadyl Complex.

[0329] 83. A composition comprising a cognate antibody or cognate antigen binding fragment associated with a respective cognate binding partner, a target cell and a nucleic acid inside the target cell encoding the respective cognate binding partner.

[0330] 84. The composition of embodiment 83, wherein the target cell is a T cell, a kidney cell or a bone marrow cell.

[0331] 85. The composition of embodiment 83, wherein the target cell is a blood cell.

[0332] 86. The composition of embodiment 83, wherein the target cell is a cancer cell.

[0333] 87. The composition of embodiment 83, wherein the target cell is a leukemia cell or a neuroblastoma cell.

[0334] 88. The composition of embodiment 83, wherein the target cell is a leukemic T-cell lymphoblast.

[0335] 89. The composition of embodiment 83, wherein the target cell is a Jurkat cell, a HEK-293, an SH-SY5Y cell, or a CHO cell.

[0336] 90. The composition of any one of embodiments 83-89, wherein the respective cognate binding partner is a cancer drug target.

[0337] 91. The composition of any one of embodiments 83-90, wherein the respective cognate binding partner is a protein or a protein domain.

[0338] 92. The composition of embodiment 91, wherein the protein or protein domain has a post-translational modification.

[0339] 93. The composition of any one of embodiments 83-92, wherein the respective cognate binding partner is part of a protein complex.

[0340] 94. The composition of any one of embodiments 83-90, wherein the respective cognate binding partner comprises a lipid group or a sugar group.

[0341] 95. The composition of any one of embodiments 83-90, wherein the respective cognate binding partner is not a protein.

[0342] 96. The composition of any one of embodiments 83-90, wherein the respective cognate binding partner is a lipid.

[0343] 97. The composition of any one of embodiments 83-90, wherein the respective cognate binding partner is a sugar.

[0344] 98. The composition of any one of embodiments 83-97, wherein the respective cognate binding partner is from a mammal.

[0345] 99. The composition of any one of embodiments 83-98, wherein the respective cognate binding partner is from a mouse.

[0346] 100. The composition of any one of embodiments 83-98, wherein the respective cognate binding partner is from a human.

[0347] 101. The composition of any one of embodiments 83-93, 98, or 99, wherein the respective cognate binding partner is a cell surface protein.

[0348] 102. The composition of any one of embodiments 83-93, 98, or 99, wherein the respective cognate binding partner is a membrane protein or membrane protein domain.

[0349] 103. The composition of any one of embodiments 83-93, 98, or 99, wherein the respective cognate binding partner is an intracellular protein.

[0350] 104. The composition of any one of embodiments 83-93, 98, or 99, wherein the respective cognate binding partner is a cytosolic protein.

[0351] 105. The composition of any one of embodiments 83-93, 98, or 99, wherein the respective cognate binding partner is a nuclear protein.

[0352] 106. The composition of any one of embodiments 83-93, 98, or 99. wherein the respective cognate binding partner is a peptide.

LENGTHY TABLES
The patent application contains a lengthy table section. A copy of the table is available in electronic form from the USPTO web site (https://seqdata.uspto.gov/?pageRequest=docDetail&DocID=US20250012808A1). An electronic copy of the table will also be available from the USPTO upon request and payment of the fee set forth in 37 CFR 1.19(b)(3).

1. A method for the identification of respective binding partners for a plurality of unique cognate antibodies or antigen binding fragments thereof, the method comprising:
(a) introducing into a population of cells a plurality of nucleic acids encoding a plurality of binding partners, which results in expression of a plurality of unique binding partners on the surface of the cells; and
(b) incubating the cells obtained in step (a) with a plurality of unique antibodies or antigen binding fragments thereof under conditions that allow for binding to the plurality of unique binding partners;
wherein the plurality of unique cognate antibodies or antigen binding fragments thereof is matched to their respective cognate binding partner if their binding to a cell in which the cognate binding partner is introduced is higher as compared to the binding to a cell in which the nucleic acid encoding the cognate binding partner was not expressed or expressed at a lower level.

2-4. (canceled)

5. A method for the identification of respective binding partners for a plurality of unique cognate antibodies or antigen binding fragments thereof, the method comprising:
(a) providing a population of cells that express one or more cognate binding partners;
(b) disrupting and/or decreasing the expression of one or more cognate binding partners in one or more cells of the population;
(c) incubating the population of cells in step (b) with a plurality of unique antibodies or antigen binding fragments thereof under conditions that allow for the binding of cognate antibodies or cognate antigen binding fragments thereof to their respective cognate binding partner; and
(d) determining which cognate antibodies or cognate antigen binding fragments thereof did not bind or had decreased binding to one or more cells of the population with disrupted and/or decreased cognate binding partner expression;
wherein the respective cognate binding partners for the plurality of cognate antibodies or cognate antigen binding fragments thereof is identified when the cognate antibodies or cognate antigen binding fragments thereof is determined to have not bound or had lower binding to the cell in which the cognate binding partner is disrupted and/or decreased.

6-37. (canceled)

38. A method for obtaining a plurality of unique cognate antibodies or antigen binding fragments thereof that bind to their respective cognate binding partner present on a surface comprising:
(a) incubating a plurality of unique antibodies or antigen binding fragments thereof with one or more binding partners bound to the surface under conditions that allow for binding of the antibodies or antigen binding fragments thereof to their respective cognate binding partner; and
(b) collecting a plurality of antibodies or antigen binding fragments thereof that had bound to their respective cognate binding partner;
wherein the plurality of unique cognate antibodies or antigen binding fragments thereof that bind to their respective cognate binding partner are obtained.

39-78. (canceled)

79. A method for the detection of respective cognate binding partners in a sample comprising:
(a) incubating a sample comprising a population of cells expressing cognate binding partners with a plurality of ribosome display complexes, wherein the ribosome display complexes comprise:
(1) a plurality of unique antibodies or antigen binding fragments thereof,
(2) nucleic acids encoding the plurality of unique antibodies or antigen binding fragments thereof, and
(3) ribosomes,
wherein the sample and the plurality of ribosome display complexes are incubated under conditions that allow for binding of the plurality of the antibodies or antigen binding fragments thereof to their respective cognate binding partners expressed by the cells of the sample;
(b) detecting the ribosome display complexes that bound to their cognate binding partners in the sample; and
(c) quantifying the cognate antibodies or cognate antigen binding fragments thereof bound to their cognate binding partners expressed by the cells of the sample, thereby detecting the respective cognate binding partners in the sample.

80. The method of claim 79, wherein at least one nucleic acid encoding an antibody or antigen binding fragment thereof comprises a unique barcode in the open reading frame (ORF).

81. The method of claim 79, wherein the sample is selected from the group consisting of single cells, tissue slices, organs, and organisms.

82. The method of claim 80, wherein step (c) further comprises sequencing one or more of the barcodes.

83. The method of claim 80, wherein the barcodes are the nucleic acid sequence of CDR1, CDR2, or CDR3 of the cognate antibodies or antigen binding fragments thereof.

84. The method of claim 79, wherein step (b) is achieved by using secondary antibodies or by fluorescence in situ hybridization.

85. (canceled)

86. The method of claim 79, wherein:
a plurality of nucleic acids encoding the antibodies or antigen binding fragments thereof is used to determine a surface proteome of a cell.

87. (canceled)

88. The method of either claim 86, wherein the surface proteome of a cell in the population of cells is determined using flow cytometry, imaging, proteomic analysis, or functional analysis.

89. The method of claim 88 further comprising sequencing a plurality of nucleic acids encoding the antibodies or antigen binding fragments thereof, clustering the nucleic acid sequences computationally, synthesizing one or more sequences from one or more clusters of antibodies or antigen binding fragments thereof for cloning of the respective genes, and testing the respective antibodies or antigen binding fragments thereof.

90. The method of claim 79, wherein the cognate antibodies or cognate antigen binding fragments thereof are allowed to bind to their respective cognate binding partners in the presence of ribonuclease inhibitors.

91-92. (Canceled)

93. The method of claim 79, wherein the antibodies or antigen binding fragments thereof are nanobodies.

94. The method of any claim 79, wherein the antibodies or antigen binding fragments thereof are a variable domain of the heavy chain (VHH).

95. The method of claim 79, wherein the antibodies or antigen binding fragments thereof are modified to alter stability, aggregation propensity, in vivo half-life, neutralizing activity, and/or dimerization.

96. The method of claim 79, wherein the antibodies or antigen binding fragments thereof are fusion proteins.

97. The method of claim 79, wherein the antibodies or antigen binding fragments thereof are fused to another antibody or antibody fragment thereof, Fc domain, antigen binding domain, glutathione S-transferase (GST), and/or serum albumin; and/or modified with a small molecule.

98. The method of claim 79, wherein the respective cognate binding partner is an antigen.

99. A composition comprising a cognate antibody or cognate antigen binding fragment thereof associated with a respective cognate binding partner, a target cell, and a nucleic acid inside the target cell encoding, or interfering with the expression of, the respective cognate binding partner.

100-124. (canceled)

The application's sequence listing, which the Patent Office published only in electronic form, follows.

SEQUENCE LISTING (13105 sequences)

SEQ ID NO: 1 - protein, 413 aa, Homo sapiens [sequence omitted]

SEQ ID NO: 2 - protein, 368 aa, Homo sapiens
MVLEVSDHQVLNDAEVAALLENFSSSYDYGENESDSCCTSPPCPQDFSLNFDRAFLPALYSLLFLLGLLGNGAVAAVLLSRRTALSSTDTFLLHLAVADTLLVLTLPLWAVDAAVQWVFGSGLCKVAGALFNINFYAGALLLACISFDRYLNIVHATQLYRRGPPARVTLTCLAVWGLCLLFALPDFIFLSAHHDERLNATHCQYNFPQVGRTALRVLQLVAGFLLPLLVMAYCYAHILAVLLVSRGQRRLRAMRLVVVVVVAFALCWTPYHLVVLVDILMDLGALARNCGRESRVDVAKSVTSGLGYMHCCLNPLLYAFVGVKFRERMWMLLLRLGCPNQRGLQRQPSSSRRDSSWSETSEASYSGL

SEQ ID NO: 3 - protein, 372 aa, Homo sapiens
MNYPLTLEMDLENLEDLFWELDRLDNYNDTSLVENHLCPATEGPLMASFKAVFVPVAYSLIFLLGVIGNVLVLVILERHRQTRSSTETFLFHLAVADLLLVFILPFAVAEGSVGWVLGTFLCKTVIALHKVNFYCSSLLLACIAVDRYLAIVHAVHAYRHRRLLSIHITCGTIWLVGFLLALPEILFAKVSQGHHNNSLPRCTFSQENQAETHAWFTSRFLYHVAGFLLPMLVMGWCYVGVVHRLRQAQRRPQRQKAVRVAILVTSIFFLCWSPYHIVIFLDTLARLKAVDNTCKLNGSLPVAITMCEFLGLAHCCLNPMLYTFAGVKFRSDLSRLLTKLGCTGPASLCQLFPSWRRSSLSESENATSLTTF

SEQ ID NO: 4 - protein, 374 aa, Homo sapiens
MLSTSRSRFIRNTNESGEEVTTFFDYDYGAPCHKFDVKQIGAQLLPPLYSLVFIFGFVGNMLVVLILINCKKLKCLTDIYLLNLAISDLLFLITLPLWAHSAANEWVFGNAMCKLFTGLYHIGYFGGIFFIILLTIDRYLAIVHAVFALKARTVTFGVVTSVITWLVAVFASVPGIIFTKCQKEDSVYVCGPYFPRGWNNFHTIMRNILGLVLPLLIMVICYSGILKTLLRCRNEKKRHRAVRVIFTIMIVYFLFWTPYNIVILLNTFQEFFGLSNCESTSQLDQATQVTETLGMTHCCINPIIYAFVGEKFRSLFHIALGCRIAPLQKPVCGGPGVRPGKNVKVTTQGLLDGRGKGKSIGRAPEASLQDKEGA

SEQ ID NO: 5 - protein, 360 aa, Homo sapiens
MNPTDIADTTLDESIYSNYYLYESIPKPCTKEGIKAFGELFLPPLYSLVFVFGLLGNSVVVLVLFKYKRLRSMTDVYLLNLAISDLLFVFSLPFWGYYAADQWVFGLGLCKMISWMYLVGFYSGIFFVMLMSIDRYLAIVHAVFSLRARTLTYGVITSLATWSVAVFASLPGFLFSTCYTERNHTYCKTKYSLNSTTWKVLSSLEINILGLVIPLGIMLFCYSMIIRTLQHCKNEKKNKAVKMIFAVVVLFLGFWTPYNIVLFLETLVELEVLQDCTFERYLDYAIQATETLAFVHCCLNPIIYFFLGEKFRKYILQLFKTCRGLFVLCQYCGLLQIYSADTPSSSYTQSTMDHDLHDAL

SEQ ID NO: 6 - protein, 378 aa, Homo sapiens
MDLGKPMKSVLVVALLVIFQVCLCQDEVTDDYIGDNTTVDYTLFESLCSKKDVRNFKAWFLPIMYSIICFVGLLGNGLVVLTYIYFKRLKTMTDTYLLNLAVADILFLLTLPFWAYSAAKSWVFGVHFCKLIFAIYKMSFFSGMLLLLCISIDRYVAIVQAVSAHRHRARVLLISKLSCVGIWILATVLSIPELLYSDLQRSSSEQAMRCSLITEHVEAFITIQVAQMVIGFLVPLLAMSFCYLVIIRTLLQARNFERNKAIKVIIAVVVVFIVFQLPYNGVVLAQTVANFNITSSTCELSKQLNIAYDVTYSLACVRCCVNPFLYAFIGVKFRNDLFKLFKDLGCLSQEQLRQWSSCRHIRRSSMSVEAETTTTFSP

SEQ ID NO: 7 - protein, 355 aa, Homo sapiens
MDYTLDLSVTTVTDYYYPDIFSSPCDAELIQTNGKLLLAVFYCLLFVFSLLGNSLVILVLVVCKKLRSITDVYLLNLALSDLLFVFSFPFQTYYLLDQWVFGTVMCKVVSGFYYIGFYSSMFFITLMSVDRYLAVVHAVYALKVRTIRMGTTLCLAVWLTAIMATIPLLVFYQVASEDGVLQCYSFYNQQTLKWKIFTNFKMNILGLLIPFTIFMFCYIKILHQLKRCQNHNKTKAIRLVLIVVIASLLFWVPFNVVLFLTSLHSMHILDGCSISQQLTYATHVTEIISFTHCCVNPVIYAFVGEKFKKHLSEIFQKSCSQIFNYLGRQMPRESCEKSSSCQQHSSRSSSVDYIL

SEQ ID NO: 8 - protein, 220 aa, Homo sapiens
MFVFLVLLPLVSSQGGKKVVLGKKGDTVELTCTASQKKSIQFHWKNSNQIKILGNQGSFLTKGPSKLNDRADSRRSLWDQGNFPLIIKNLKIEDSDTYICEVEDQKEEVQLLVFGLTANSDTHLLQGQSLTLTLESPPGSSPSVQCRSPRGKNIQGGKTLSVSQLELQDSGTWTCTVLQNQKKVEFKIDIVVLAGSPDHSAATKPSLFLFLVSLLHIFFK

SEQ ID NO: 9 - protein, 146 aa, Homo sapiens
MFVFLVLLPLVSSQGGDGNEEMGGITQTPYKVSISGTTVILTCPQYPGSEILWQHNDKNIGGDEDDKNIGSDEDHLSLKEFSELEQSGYYVCYPRGSKPEDANFYLYLRARVCENCMEMDGSPDHSAATKPSLFLFLVSLLHIFFK

SEQ ID NO: 10 - protein, 176 aa, Homo sapiens
MFVFLVLLPLVSSQGGNKILVKQSPMLVAYDNAVNLSCKYSYNLFSREFRASLHKGLDSAVEVCVVYGNYSQQLQVYSKTGFNCDGKLGNESVTFYLQNLYVNQTDIYFCKIEVMYPPPYLDNEKSNGTIIHVKGKHLCPSPLFPGPSKPGSPDHSAATKPSLFLFLVSLLHIFFK

SEQ ID NO: 11 - protein, 300 aa, Homo sapiens
MFVFLVLLPLVSSQGGPEEPLVVKVEEGDNAVLQCLKGTSDGPTQQLTWSRESPLKPFLKLSLGLPGLGIHMRPLAIWLFIFNVSQQMGGFYLCQPGPPSEKAWQPGWTVNVEGSGELFRWNVSDLGGLGCGLKNRSSEGPSSPSGKLMSPKLYVWAKDRPEIWEGEPPCLPPRDSLNQSLSQDLTMAPGSTLWLSCGVPPDSVSRGPLSWTHVHPKGPKSLLSLELKDDRPARDMWVMETGLLLPRATAQDAGKYYCHRGNLTMSFHLEITARGSPDHSAATKPSLFLFLVSLLHIFFK

SEQ ID NO: 12 - protein, 261 aa, Homo sapiens
MFVFLVLLPLVSSQGGELCDDDPPEIPHATFKAMAYKEGTMLNCECKRGFRRIKSGSLYMLCTGNSSHSSWDNQCQCTSSATRNTTKQVTPQPEEQKERKTTEMQSPMQPVDQASLPGHCREPPPWENEATERIYHFVVGQMVYYQCVQGYRALHRGPAESVCKMTHGKTRWTQPQLICTGEMETSQFPGEEKPQASPEGRPESETSCLVTTTDFQIQTEMAATMETSIFTTEYQGSPDHSAATKPSLFLFLVSLLHIFFK

SEQ ID NO: 13 - protein, 394 aa, Homo sapiens
MFVFLVLLPLVSSQGGKPTCDEKYANITVDYLYNKETKLFTAKLNVNENVECGNNTCTNNEVHNLTECKNASVSISHNSCTAPDKTLILDVPPGVEKFQLHDCTQVEKADTTICLKWKNIETFTCDTQNITYRFQCGNMIFDNKEIKLENLEPEHEYKCDSEILYNNHKFTNASKIIKTDFGSPGEPQIIFCRSEAAHQGVITWNPPQRSFHNFTLCYIKETEKDCLNLDKNLIKYDLQNLKPYTKYVLSLHAYIIAKVQRNGSAAMCHFTTKSAPPSQVWNMTVSMTSDNSMHVKCRPPRDRNGPHERYHLEVEAGNTLVRNESHKNCDFRVKDLQYSTDYTFKAYFHNGDYPGEPFILHHSTSYNSGSPDHSAATKPSLFLFLVSLLHIFFK

SEQ ID NO: 14 - protein, 171 aa, Homo sapiens
MFVFLVLLPLVSSQGGWNPPTFSPALLVVTEGDNATFTCSFSNTSESFVLNWYRMSPSNQTDKLAAFPEDRSQPGQDCRFRVTQLPNGRDFHMSVVRARRNDSGTYLCGAISLAPKAQIKESLRAELRVTERRAEVPTAHPSPSPGSPDHSAATKPSLFLFLVSLLHIFFK

SEQ ID NO: 15 - protein, 262 aa, Homo sapiens
MFVFLVLLPLVSSQGGFTVTVPKDLYVVEYGSNMTIECKFPVEKQLDLAALIVYWEMEDKNIIQFVHGEEDLKVQHSSYRQRARLLKDQLSLGNAALQITDVKLQDAGVYRCMISYGGADYKRITVKVNAPYNKINQRILVVDPVTSEHELTCQAEGYPKAEVIWTSSDHQVLSGKTTTTNSKREEKLFNVTSTLRINTTTNEIFYCTFRRLDPEENHTAELVIPELPLAHPPNERGSPDHSAATKPSLFLFLVSLLHIFFK

SEQ ID NO: 16 - protein, 168 aa, Homo sapiens
MFVFLVLLPLVSSQGGKAMHVAQPAVVLASSRGIASFVCEYASPGKATEVRVTVLRQADSQVTEVCAATYMMGNELTFLDDSICTGTSSGNQVNLTIQGLRAMDTGLYICKVELMYPPPYYLGIGNGTQIYVIDPEPCPDSDGSPDHSAATKPSLFLFLVSLLHIFFK

SEQ ID NO: 17 - protein, 151 aa, Homo sapiens
MFVFLVLLPLVSSQGGSEVEYRAEVGQNAYLPCFYTPAAPGNLVPVCWGKGACPVFECGNVVLRTDERDVNYWTSRYWLNGDFRKGDVSLTIENVTLADSGIYCCRIQIPGIMNDEKFNLKLVIKGSPDHSAATKPSLFLFLVSLLHIFFK

SEQ ID NO: 18 - protein, 153 aa, Homo sapiens
MFVFLVLLPLVSSQGGLDFQALEETTEYDGGYTRDSVLIREFWEIVHSFTDEQKRLFLQFTTGTDRAPVGGLGKLKMIIAKNGPDTERLPTSHTCFNVLLLPEYSSKEKLKERLLKAITYAKGFGMLGSPDHSAATKPSLFLFLVSLLHIFFK

SEQ ID NO: 19 - protein, 159 aa, Homo sapiens
MFVFLVLLPLVSSQGGFTLQPAAHTGAARSCRFRGRHYKREFRLEGEPVALRCPQVPYWLWASVSPRINLTWHKNDSARTVPGEEETRMWAQDGALWLLPALQEDSGTYVCTTRNASYCDKMSIELRVFENTDGSPDHSAATKPSLFLFLVSLLHIFFK

SEQ ID NO: 20 - protein, 359 aa, Homo sapiens
MFVFLVLLPLVSSQGGTTPEPCELDDEDFRCVCNFSEPQPDWSEAFQCVSAVEVEIHAGGLNLEPFLKRVDADADPRQYADTVKALRVRRLTVGAAQVPAQLLVGALRVLAYSRLKELTLEDLKITGTMPPLPLEATGLALSSLRLRNVSWATGRSWLAELQQWLKPGLKVLSIAQAHSPAFSCEQVRAFPALTSLDLSDNPGLGERGLMAALCPHKFPAIQNLALRNTGMETPTGVCAALAAAGVQPHSLDLSHNSLRATVNPSAPRCMWSSALNSLNLSFAGLEQVPKGLPAKLRVLDLSCNRLNRAPQPDELPEVDNLTLDGNPFLVPGTGSPDHSAATKPSLFLFLVSLLHIFFK

SEQ ID NO: 21 - protein, 231 aa, Homo sapiens
MFVFLVLLPLVSSQGGLLCQFGTVQHVWKVSDLPRQWTPKNTSCDSGLGCQDTLMLIESGPQVSLVLSKGCTEAKDQEPRVTEHRMGPGLSLISYTFVCRQEDFCNNLVNSLPLWAPQPPADPGSLRCPVCLSMEGCLEGTTEEICPKGTTHCYDGLLRLRGGGIFSNLRVQGCMPQPGCNLLNGTQEIGPVGMTENCNRKDFLTGSPDHSAATKPSLFLFLVSLLHIFFK

SEQ ID NO: 22 - protein, 261 aa, Homo sapiens
MFVFLVLLPLVSSQGGESGYAQNGDLEDAELDDYSFSCYSQLEVNGSQHSLTCAFEDPDVNITNLEFEICGALVEVKCLNFRKLQEIYFIETKKFLLIGKSNICVKVGEKSLTCKKIDLTTIVKPEAPFDLSVVYREGANDFVVTFNTSHLQKKYVKVLMHDVAYRQEKDENKWTHVNLSSTKLTLLQRKLQPAAMYEIKVRSIPDHYFKGFWSEWSPSYYFRTPEINNSSGEMDGSPDHSAATKPSLFLFLVSLLHIFFK

SEQ ID NO: 23 - protein, 175 aa, Homo sapiens
MFVFLVLLPLVSSQGGAPTSSSTKKTQLQLEHLLLDLQMILNGINNYKNPKLTRMLTFKFYMPKKATELKHLQCLEEELKPLEEVLNLAQSKNFHLRPRDLISNINVIVLELKGSETTFMCEYADETATIVEFLNRWITFCQSIISTLTGSPDHSAATKPSLFLFLVSLLHIFFK

SEQ ID NO: 24 - protein, 292 aa, Homo sapiens
MFVFLVLLPLVSSQGGQPIFLNVLEAIEPGVVCAGHDNNQPDSFAALLSSLNELGERQLVHVVKWAKALPGFRNLHVDDQMAVIQYSWMGLMVFAMGWRSFTNVNSRMLYFAPDLVFNEYRMHKSRMYSQCVRMRHLSQEFGWLQITPQEFLCMKALLLFSIIPVDGLKNQKFFDELRMNYIKELDRIIACKRKNPTSCSRRFYQLTKLLDSVQPIARELHQFTFDLLIKSHMVSVDFPEMMAEIISVQVPKILSGKVKPIYFHTQGSPDHSAATKPSLFLFLVSLLHIFFK

SEQ ID NO: 25 - protein, 150 aa, Homo sapiens
MFVFLVLLPLVSSQGGDWVIPPINLPENSRGPFPQELVRIRSDRDKNLSLRYSVTGPGADQPPTGIFIINPISGQLSVTKPLDREQIARFHLRAHAVDINGNQVENPIDIVINVIDMNDNRPEFGSPDHSAATKPSLFLFLVSLLHIFFK

SEQ ID NO: 26 - protein, 645 aa, Homo sapiens
MFVFLVLLPLVSSQGGTQVCTGTDMKLRLPASPETHLDMLRHLYQGCQVVQGNLELTYLPTNASLSFLQDIQEVQGYVLIAHNQVRQVPLQRLRIVRGTQLFEDNYALAVLDNGDPLNNTTPVTGASPGGLRELQLRSLTEILKGGVLIQRNPQLCYQDTILWKDIFHKNNQLALTLIDTNRSRACHPCSPMCKGSRCWGESSEDCQSLTRTVCAGGCARCKGPLPTDCCHEQCAAGCTGPKHSDCLACLHFNHSGICELHCPALVTYNTDTFESMPNPEGRYTFGASCVTACPYNYLSTDVGSCTLVCPLHNQEVTAEDGTQRCEKCSKPCARVCYGLGMEHLREVRAVTSANIQEFAGCKKIFGSLAFLPESFDGDPASNTAPLQPEQLQVFETLEEITGYLYISAWPDSLPDLSVFQNLQVIRGRILHNGAYSLTLQGLGISWLGLRSLRELGSGLALIHHNTHLCFVHTVPWDQLFRNPHQALLHTANRPEDECVGEGLACHQLCARGHCWGPGPTQCVNCSQFLRGQECVEECRVLQGLPREYVNARHCLPCHPECQPQNGSVTCFGPEADQCVACAHYKDPPFCVARCPSGVKPDLSYMPIWKFPDEEGACQPGSPDHSAATKPSLFLFLVSLLHIFFK

SEQ ID NO: 27 - protein, 283 aa, Homo sapiens
MFVFLVLLPLVSSQGGLAPAEISAVCEKGNFNVAHGLAWSYYIGYLRLILPELQARIRTYNQHYNNLLRGAVSQRLYILLPLDCGVPDNLSMADPNIRFLDKLPQQTGDHAGIKDRVYSNSIYELLENGQRAGTCVLEYATPLQTLFAMSQYSQAGFSREDRLEQAKLFCRTLEDILADAPESQNNCRLIAYQEPADDSSFSLSQEVLRHLRQEEKEEVTVGSLKTSAVPSTSTMSQEPELLISGMEKPLPLRTDFSGSPDHSAATKPSLFLFLVSLLHIFFK

SEQ ID NO: 28 - protein, 265 aa, Homo sapiens
MFVFLVLLPLVSSQGGRVQPTESIVRFPNITNLCPFGEVFNATRFASVYAWNRKRISNCVADYSVLYNSASFSTFKCYGVSPTKLNDLCFTNVYADSFVIRGDEVRQIAPGQTGKIADYNYKLPDDFTGCVIAWNSNNLDSKVGGNYNYLYRLFRKSNLKPFERDISTEIYQAGSTPCNGVEGFNCYFPLQSYGFQPTNGVGYQPYRVVVLSFELLHAPATVCGPKKSTNLVKNKCVNFGSPDHSAATKPSLFLFLVSLLHIFFK

SEQ ID NO: 29 - protein, 282 aa, Homo sapiens
MFVFLVLLPLVSSQGASVSKGEELFTGVVPILVELDGDVNGHKFSVSGEGEGDATYGKLTLKFICTTGKLPVPWPTLVTTLTYGVQCFSRYPDHMKQHDFFKSAMPEGYVQERTIFFKDDGNYKTRAEVKFEGDTLVNRIELKGIDFKEDGNILGHKLEYNYNSHNVYIMADKQKNGIKVNFKIRHNIEDGSVQLADHYQQNTPIGDGPVLLPDNHYLSTQSALSKDPNEKRDHMVLLEFVTAAGITLGMDELYKGGTPDHSAATKPSLFLFLVSLLHIFFK

SEQ ID NO: 30 - protein, 116 aa, Homo sapiens
MEVQLVESGGGLVQAGDSLRLSCAASGDSYILWRMGWFRQAPGKEREFVAAISLDGQFTNYADSVRGRFSISADSAKNTVYLQMNSLKPEDTAVYYCAALPFLDYWGQGTQVTVSS

SEQ ID NO: 31 - protein, 121 aa, Homo sapiens
MEVQLVESGGGLVQAGDSLRLSCAASGKTGRSVIMGWFRQAPDKEREFVATITRGDDTTNYADSVKGRFTISRDDARNTVYLQMNSLKPEDTAVYYCAAVYFVNDCIVDYWGQGTQVTVSS

SEQ ID NO: 32 - protein, 121 aa, Homo sapiens
MQVQLQESGGGLVQAGGSLRLSCAASGLNLAYFVMGWYRQAPGKEREFVAAITEVSAKTDYADSVKGRFTISRDDARNTVYLQMNSLKPEDTAVYYCAAHMKLWSNSMDYWGQGTQVTVSS

SEQ ID NO: 33 - protein, 116 aa, Homo sapiens
MQVQLVESGGALVQPGGSLRLSCAASGFPVNRYSMRWYRQAPGKEREWVAGMSSAGDRSSYEDSVKGRFTISRDDARNTVYLQMNSLKPEDTAVYYCNVNVGFEYWGQGTQVTVSS

SEQ ID NO: 34 - protein, 7 aa, synthetic construct
NINVRYY

SEQ ID NO: 35 - protein, 7 aa, synthetic construct
IVGPVLE

SEQ ID NO: 36 - protein, 7 aa, synthetic construct
DAVNWQV

SEQ ID NO: 37 - protein, 7 aa, synthetic construct
GLAHVFR

SEQ ID NO: 38 - protein, 7 aa, synthetic construct
SLNEWIV

SEQ ID NO: 39 - protein, 7 aa, synthetic construct
MYATAIE

SEQ ID NO: 40 - protein, 7 aa, synthetic construct
TSRLVFE

SEQ ID NO: 41 - protein, 7 aa, synthetic construct
PARALAR

SEQ ID NO: 42 - protein, 7 aa, synthetic construct
SALMLEV

SEQ ID NO: 43 - protein, 7 aa, synthetic construct
IIVPGVE

SEQ ID NO: 44 - protein, 7 aa, synthetic construct
LGQKTPD

SEQ ID NO: 45 - protein, 7 aa, synthetic construct
AISKLIW

SEQ ID NO: 46 - protein, 7 aa, synthetic construct
YDSELVF

SEQ ID NO: 47 - protein, 7 aa, synthetic construct
QCGTMLW

SEQ ID NO: 48 - protein, 7 aa, synthetic construct
AANGMTW

SEQ ID NO: 49 - protein, 7 aa, synthetic construct
RVKGMME

SEQ ID NO: 50 - protein, 7 aa, synthetic construct
GLTLGRW

SEQ ID NO: 51 - protein, 7 aa, synthetic construct
VIVADMP

SEQ ID NO: 52 - protein, 7 aa, synthetic construct
KQCVLRV

SEQ ID NO: 53 - protein, 7 aa, synthetic construct
DLTDRAF

SEQ ID NO: 54 - protein, 7 aa, synthetic construct
LRMMDAH

SEQ ID NO: 55 - protein, 7 aa, synthetic construct
VPRAVDV

SEQ ID NO: 56 - protein, 7 aa, synthetic construct
HGIDTSF

SEQ ID NO: 57 - protein, 7 aa, synthetic construct
KDLHKSF

SEQ ID NO: 58 - protein, 7 aa, synthetic construct
WEADVVH

SEQ ID NO: 59 - protein, 7 aa, synthetic construct
HYAFAGY

SEQ ID NO: 60 - protein, 7 aa, synthetic construct
IRGLVLW

SEQ ID NO: 61 - protein, 7 aa, synthetic construct
IEEMDVI

SEQ ID NO: 62 - protein, 7 aa, synthetic construct
HGWNIVE

SEQ ID NO: 63 - protein, 7 aa, synthetic construct
QSGHEIE

SEQ ID NO: 64 - protein, 7 aa, synthetic construct
GFVGLVI

SEQ ID NO: 65 - protein, 7 aa, synthetic construct
EGGSVEY

SEQ ID NO: 66 - protein, 7 aa, synthetic construct
NVDRIMK

SEQ ID NO: 67 - protein, 7 aa, synthetic construct
DMDGILE

SEQ ID NO: 68 - protein, 7 aa, synthetic construct
SQRMWME

SEQ ID NO: 69 - protein, 7 aa, synthetic construct
LPGGMLE

SEQ ID NO: 70 - protein, 7 aa, synthetic construct
HASGILE

SEQ ID NO: 71 - protein, 7 aa, synthetic construct
FDGSILE

SEQ ID NO: 72 - protein, 7 aa, synthetic construct
ACSDYIE

SEQ ID NO: 73 - protein, 7 aa, synthetic construct
GYHDVIE

SEQ ID NO: 74 - protein, 7 aa, synthetic construct
INGGLME

SEQ ID NO: 75 - protein, 7 aa, synthetic construct
GGARVME

SEQ ID NO: 76 - protein, 7 aa, synthetic construct
HVADSLE

SEQ ID NO: 77 - protein, 7 aa, synthetic construct
TVGRVME

SEQ ID NO: 78 - protein, 7 aa, synthetic construct
KVSDLLE

SEQ ID NO: 79 - protein, 7 aa, synthetic construct
MVSNIIE

SEQ ID NO: 80 - protein, 7 aa, synthetic construct
RVQVYGW

SEQ ID NO: 81 - protein, 8 aa, synthetic construct
GADGILVE

SEQ ID NO: 82 - protein, 7 aa, synthetic construct
GMSDCLE

SEQ ID NO: 83 - protein, 7 aa, synthetic construct
MIINILE

SEQ ID NO: 84 - protein, 7 aa, synthetic construct
MTRNLIE

SEQ ID NO: 85 - protein, 7 aa, synthetic construct
DIVKMVE

SEQ ID NO: 86 - protein, 7 aa, synthetic construct
DRDAFLE

SEQ ID NO: 87 - protein, 7 aa, synthetic construct
VLGHVIE

SEQ ID NO: 88 - protein, 7 aa, synthetic construct
SSGRFIE

SEQ ID NO: 89 - protein, 7 aa, synthetic construct
SIFVFKN

SEQ ID NO: 90 - protein, 7 aa, synthetic construct
QNNVIIE

SEQ ID NO: 91 - protein, 7 aa, synthetic construct
DSGAYVE

SEQ ID NO: 92 - protein, 7 aa, synthetic construct
RIDRVIE

SEQ ID NO: 93 - protein, 7 aa, synthetic construct
VIKVAIE

SEQ ID NO: 94 - protein, 7 aa, synthetic construct
CRGRHIE

SEQ ID NO: 95 - protein, 7 aa, synthetic construct
PGRSVME

SEQ ID NO: 96 - protein, 7 aa, synthetic construct
DMRDSLE

SEQ ID NO: 97 - protein, 7 aa, synthetic construct
VVGFMLE

SEQ ID NO: 98 - protein, 7 aa, synthetic construct
LMMRVLE

SEQ ID NO: 99 - protein, 7 aa, synthetic construct
IVRRPIE

SEQ ID NO: 100 - protein, 7 aa, synthetic construct
LVERLVE

SEQ ID NO: 101 - protein, 7 aa, synthetic construct
VNNTTIE

SEQ ID NO: 102 - protein, 7 aa, synthetic construct
GKQVLVE

SEQ ID NO: 103 - protein, 7 aa, synthetic construct
GEDMGYM

SEQ ID NO: 104 - protein, 7 aa, synthetic construct
LVYRRLH

SEQ ID NO: 105 - protein, 7 aa, synthetic construct
RAGLVME

SEQ ID NO: 106 - protein, 7 aa, synthetic construct
IDRHLLE

SEQ ID NO: 107 - protein, 7 aa, synthetic construct
KDRYAIE

SEQ ID NO: 108 - protein, 7 aa, synthetic construct
AHTFPVD

SEQ ID NO: 109 - protein, 7 aa, synthetic construct
LIGGAVE

SEQ ID NO: 110 - protein, 7 aa, synthetic construct
RMRKFLE

SEQ ID NO: 111 - protein, 7 aa, synthetic construct
VLGTGQL

SEQ ID NO: 112 - protein, 7 aa, synthetic construct
TLGVMME

SEQ ID NO: 113 - protein, 7 aa, synthetic construct
RHQTMLE

SEQ ID NO: 114 - protein, 7 aa, synthetic construct
CTEMALG

SEQ ID NO: 115 - protein, 7 aa, synthetic construct
VINTVLE

SEQ ID NO: 116 - protein, 7 aa, synthetic construct
VIGYVLE

SEQ ID NO: 117 - protein, 7 aa, synthetic construct
ISDRILE

SEQ ID NO: 118 - protein, 7 aa, synthetic construct
NEGLGIE

SEQ ID NO: 119 - protein, 7 aa, synthetic construct
TIDLVMF

SEQ ID NO: 120 - protein, 7 aa, synthetic construct
REEVTNV

SEQ ID NO: 121 - protein, 7 aa, synthetic construct
FNDGYLE

SEQ ID NO: 122 - protein, 7 aa, synthetic construct
GTGLMLE

SEQ ID NO: 123 - protein, 7 aa, synthetic construct
AVASCLE

SEQ ID NO: 124 - protein, 5 aa, synthetic construct
RVIIE

SEQ ID NO: 125 - protein, 7 aa, synthetic construct
NGHQVIE

SEQ ID NO: 126 - protein, 7 aa, synthetic construct
VPGYLLE

SEQ ID NO: 127 - protein, 7 aa, synthetic construct
VMGVVIE

SEQ ID NO: 128 - protein, 7 aa, synthetic construct
PGANMLE

SEQ ID NO: 129 - protein, 7 aa, synthetic construct
EVTGMLE

SEQ ID NO: 130 - protein, 7 aa, synthetic construct
EGVCVIE

SEQ ID NO: 131 - protein, 5 aa, synthetic construct
SRGGP

SEQ ID NO: 132 - protein, 7 aa, synthetic construct
NRALVTE

SEQ ID NO: 133 - protein, 7 aa, synthetic construct
NLVKMLE

SEQ ID NO: 134 - protein, 7 aa, synthetic construct
MRGLVVE

SEQ ID NO: 135 - protein, 7 aa, synthetic construct
GTMGALE

SEQ ID NO: 136 - protein, 7 aa, synthetic construct
SKHSFLE

SEQ ID NO: 137 - protein, 7 aa, synthetic construct
TAKTLIE

SEQ ID NO: 138 - protein, 7 aa, synthetic construct
YIDGVVE

SEQ ID NO: 139 - protein, 7 aa, synthetic construct
CNSTMIE

SEQ ID NO: 140 - protein, 7 aa, synthetic construct
NLKGVLE

SEQ ID NO: 141 - protein, 7 aa, synthetic construct
NVTRAIE

SEQ ID NO: 142 - protein, 7 aa, synthetic construct
FINGVLE

SEQ ID NO: 143 - protein, 7 aa, synthetic construct
TRAGIME

SEQ ID NO: 144 - protein, 7 aa, synthetic construct
MRIVFMR

SEQ ID NO: 145 - protein, 7 aa, synthetic construct
IMLVFNA

SEQ ID NO: 146 - protein, 7 aa, synthetic construct
VSEMMLE

SEQ ID NO: 147 - protein, 7 aa, synthetic construct
RVSNGVE

SEQ ID NO: 148 - protein, 7 aa, synthetic construct
RIRGAIE

SEQ ID NO: 149 - protein, 7 aa, synthetic construct
IVSYILG

SEQ ID NO: 150 - protein, 7 aa, synthetic construct
ERQAWLE

SEQ ID NO: 151 - protein, 7 aa, synthetic construct
RRLKIIE

SEQ ID NO: 152 - protein, 7 aa, synthetic construct
RMMGMVE

SEQ ID NO: 153 - protein, 7 aa, synthetic construct
NVGVEIE

SEQ ID NO: 154 - protein, 7 aa, synthetic construct
RTQDVLF

SEQ ID NO: 155 - protein, 7 aa, synthetic construct
CIRNAVD

SEQ ID NO: 156 - protein, 7 aa, synthetic construct
QCSGVVE

SEQ ID NO: 157 - protein, 7 aa, synthetic construct
VTSLALE

SEQ ID NO: 158 - protein, 7 aa, synthetic construct
MIGVFLE

SEQ ID NO: 159 - protein, 7 aa, synthetic construct
VVYPIVE

SEQ ID NO: 160 - protein, 7 aa, synthetic construct
SKDGILE

SEQ ID NO: 161 - protein, 7 aa, synthetic construct
RVHDAIE

SEQ ID NO: 162 - protein, 7 aa, synthetic construct
TTYKAIF

SEQ ID NO: 163 - protein, 7 aa, synthetic construct
MFAQGLE

SEQ ID NO: 164 - protein, 7 aa, synthetic construct
IWLIVVE

SEQ ID NO: 165 - protein, 7 aa, synthetic construct
MCRVTIE

SEQ ID NO: 166 - protein, 7 aa, synthetic construct
EQSLIME

SEQ ID NO: 167 - protein, 7 aa, synthetic construct
RILDVIE

SEQ ID NO: 168 - protein, 7 aa, synthetic construct
QLSRMVE

SEQ ID NO: 169 - protein, 7 aa, synthetic construct
GGAGILE

SEQ ID NO: 170 - protein, 7 aa, synthetic construct
LFGLLME

SEQ ID NO: 171 - protein, 7 aa, synthetic construct
SRIVFQS

SEQ ID NO: 172 - protein, 7 aa, synthetic construct
ITAIVLE

SEQ ID NO: 173 - protein, 7 aa, synthetic construct
PGWGIME

SEQ ID NO: 174 - protein, 7 aa, synthetic construct
GAKELME

SEQ ID NO: 175 - protein, 7 aa, synthetic construct
FRIVFTD

SEQ ID NO: 176 - protein, 7 aa, synthetic construct
SGFGLIE

SEQ ID NO: 177 - protein, 7 aa, synthetic construct
RLGVVLE

SEQ ID NO: 178 - protein, 7 aa, synthetic construct
LGRFGIE

SEQ ID NO: 179 - protein, 7 aa, synthetic construct
VMDGAIE

SEQ ID NO: 180 - protein, 7 aa, synthetic construct
QIRGALE

SEQ ID NO: 181 - protein, 7 aa, synthetic construct
IRHRCIE

SEQ ID NO: 182 - protein, 7 aa, synthetic construct
LIDGGVE

SEQ ID NO: 183 - protein, 7 aa, synthetic construct
TSVQMIE

SEQ ID NO: 184 - protein, 7 aa, synthetic construct
KQGLMLE

SEQ ID NO: 185 - protein, 7 aa, synthetic construct
EPVGVVE

SEQ ID NO: 186 - protein, 7 aa, synthetic construct
MVRGGLE

SEQ ID NO: 187 - protein, 7 aa, synthetic construct
GRPLLVE

SEQ ID NO: 188 - protein, 7 aa, synthetic construct
SMGNVLE

SEQ ID NO: 189 - protein, 7 aa, synthetic construct
SAPGTLE

SEQ ID NO: 190 - protein, 7 aa, synthetic construct
NLGGLME

SEQ ID NO: 191 - protein, 7 aa, synthetic construct
IVQGFVE

SEQ ID NO: 192 - protein, 7 aa, synthetic construct
QARGAIE

SEQ ID NO: 193 - protein, 7 aa, synthetic construct
KAREKIE

SEQ ID NO: 194 - protein, 7 aa, synthetic construct
NRRGSVE

SEQ ID NO: 195 - protein, 7 aa, synthetic construct
ARGVIIE

SEQ ID NO: 196 - protein, 7 aa, synthetic construct
IKSSVLE

SEQ ID NO: 197 - protein, 7 aa, synthetic construct
WRIVFRS

SEQ ID NO: 198 - protein, 7 aa, synthetic construct
DTRRLLE

SEQ ID NO: 199 - protein, 7 aa, synthetic construct
IWVTVLE

SEQ ID NO: 200 - protein, 7 aa, synthetic construct
HNTTVLE

SEQ ID NO: 201 - protein, 7 aa, synthetic construct
NGKEVLE

SEQ ID NO: 202 - protein, 7 aa, synthetic construct
FEKAGVE

SEQ ID NO: 203 - protein, 7 aa, synthetic construct
IVGKVIE

SEQ ID NO: 204 - protein, 7 aa, synthetic construct
IRGSLIE

SEQ ID NO: 205 - protein, 7 aa, synthetic construct
RISGIIE

SEQ ID NO: 206 - protein, 7 aa, synthetic construct
IVRDLME

SEQ ID NO: 207 - protein, 7 aa, synthetic construct
VPQTVLE

SEQ ID NO: 208 - protein, 7 aa, synthetic construct
NLYYMLE

SEQ ID NO: 209 - protein, 7 aa, synthetic construct
LGGIVIE

SEQ ID NO: 210 - protein, 7 aa, synthetic construct
NVRTLME

SEQ ID NO: 211 - protein, 7 aa, synthetic construct
VTVMFIE

SEQ ID NO: 212 - protein, 7 aa, synthetic construct
AGRFIME

SEQ ID NO: 213 - protein, 7 aa, synthetic construct
TADRYIE

SEQ ID NO: 214 - protein, 7 aa, synthetic construct
DPGTMLE

SEQ ID NO: 215 - protein, 7 aa, synthetic construct
GQERVID

SEQ ID NO: 216 - protein, 7 aa, synthetic construct
GYERVVE

SEQ ID NO: 217 - protein, 7 aa, synthetic construct
LGCDVME

SEQ ID NO: 218 - protein, 7 aa, synthetic construct
VTMVMLE

SEQ ID NO: 219 - protein, 7 aa, synthetic construct
QSVFFIE

SEQ ID NO: 220 - protein, 7 aa, synthetic construct
LGDFSVE

SEQ ID NO: 221 - protein, 7 aa, synthetic construct
TCADVVE

SEQ ID NO: 222 - protein, 7 aa, synthetic construct
LGRHVME

SEQ ID NO: 223 - protein, 7 aa, synthetic construct
VHGDGLC

SEQ ID NO: 224 - protein, 7 aa, synthetic construct
RSNLVLE

SEQ ID NO: 225 - protein, 7 aa, synthetic construct
MAYNVIE

SEQ ID NO: 226 - protein, 7 aa, synthetic construct
SSWRLIE

SEQ ID NO: 227 - protein, 7 aa, synthetic construct
HVCVVVE

SEQ ID NO: 228 - protein, 7 aa, synthetic construct
HHNVLLE

SEQ ID NO: 229 - protein, 7 aa, synthetic construct
EGRVTIE

SEQ ID NO: 230 - protein, 7 aa, synthetic construct
SICEVVE

SEQ ID NO: 231 - protein, 7 aa, synthetic construct
RREVLIE

SEQ ID NO: 232 - protein, 7 aa, synthetic construct
IIGGLMA

SEQ ID NO: 233 - protein, 7 aa, synthetic construct
SGDSMIE

SEQ ID NO: 234 - protein, 7 aa, synthetic construct
TMGLMVD

SEQ ID NO: 235 - protein, 7 aa, synthetic construct
GMIGVIE

SEQ ID NO: 236 - protein, 7 aa, synthetic construct
QSGYAIE

SEQ ID NO: 237 - protein, 7 aa, synthetic construct
QGVWILE

SEQ ID NO: 238 - protein, 7 aa, synthetic construct
YCGTIIE

SEQ ID NO: 239 - protein, 7 aa, synthetic construct
VCGVCLE

SEQ ID NO: 240 - protein, 7 aa, synthetic construct
PLSSMLE

SEQ ID NO: 241 - protein, 7 aa, synthetic construct
VSSDVME

SEQ ID NO: 242 - protein, 7 aa, synthetic construct
KRIVFQE

SEQ ID NO: 243 - protein, 7 aa, synthetic construct
SLRDVIE

SEQ ID NO: 244 - protein, 7 aa, synthetic construct
ESGGKIE

SEQ ID NO: 245 - protein, 7 aa, synthetic construct
NVDDIIE

SEQ ID NO: 246 - protein, 7 aa, synthetic construct
LTERTLE

SEQ ID NO: 247 - protein, 7 aa, synthetic construct
HMVNVVE

SEQ ID NO: 248 - protein, 7 aa, synthetic construct
HEGRVLE

SEQ ID NO: 249 - protein, 7 aa, synthetic construct
SSGAVVE

SEQ ID NO: 250 - protein, 7 aa, synthetic construct
NHAMLIE

SEQ ID NO: 251 - protein, 7 aa, synthetic construct
LERSGLE

SEQ ID NO: 252 - protein, 7 aa, synthetic construct
IYQGVME

SEQ ID NO: 253 - protein, 7 aa, synthetic construct
ISGILVE

SEQ ID NO: 254 - protein, 7 aa, synthetic construct
VEPSAGI

SEQ ID NO: 255 - protein, 7 aa, synthetic construct
DVTGFIE

SEQ ID NO: 256 - protein, 7 aa, synthetic construct
AEGIDLE

SEQ ID NO: 257 - protein, 7 aa, synthetic construct
ATGVNVE

SEQ ID NO: 258 - protein, 7 aa, synthetic construct
NIGAGAL

SEQ ID NO: 259 - protein, 7 aa, synthetic construct
MMPNALE

SEQ ID NO: 260 - protein, 7 aa, synthetic construct
QVPDVLE

SEQ ID NO: 261 - protein, 7 aa, synthetic construct
LRPAVME

SEQ ID NO: 262 - protein, 7 aa, synthetic construct
PMPMALE

SEQ ID NO: 263 - protein, 7 aa, synthetic construct
DPEFNVE

SEQ ID NO: 264 - protein, 7 aa, synthetic construct
DPGTIVE

SEQ ID NO: 265 - protein, 7 aa, synthetic construct
VRIVFRD

SEQ ID NO: 266 - protein, 7 aa, synthetic construct
TVYDVIE

SEQ ID NO: 267 - protein, 7 aa, synthetic construct
AYARVLE

SEQ ID NO: 268 - protein, 7 aa, synthetic construct
FKHAFIE

SEQ ID NO: 269 - protein, 7 aa, synthetic construct
RGNMMVE

SEQ ID NO: 270 - protein, 7 aa, synthetic construct
EFFCPLE

SEQ ID NO: 271 - protein, 7 aa, synthetic construct
STANFVE

SEQ ID NO: 272 - protein, 7 aa, synthetic construct
VVPGVVE

SEQ ID NO: 273 - protein, 7 aa, synthetic construct
GLGVILE

SEQ ID NO: 274 - protein, 7 aa, synthetic construct
VNDGVIE

SEQ ID NO: 275 - protein, 7 aa, synthetic construct
RRIVFKG

SEQ ID NO: 276 - protein, 7 aa, synthetic construct
CTGATVE

SEQ ID NO: 277 - protein, 7 aa, synthetic construct
MKGHFVE

SEQ ID NO: 278 - protein, 7 aa, synthetic construct
QAIVFRA

SEQ ID NO: 279 - protein, 7 aa, synthetic construct
RRIVFGG

SEQ ID NO: 280 - protein, 7 aa, synthetic construct
SRIVFRY

SEQ ID NO: 281 - protein, 7 aa, synthetic construct
LGHVIIE

SEQ ID NO: 282 - protein, 7 aa, synthetic construct
VTGVAVE

SEQ ID NO: 283 - protein, 7 aa, synthetic construct
HEPNVLE

SEQ ID NO: 284 - protein, 7 aa, synthetic construct
DLVNALT

SEQ ID NO: 285 - protein, 7 aa, synthetic construct
YSGLVVE

SEQ ID NO: 286 - protein, 7 aa, synthetic construct
MIKGILE

SEQ ID NO: 287 - protein, 7 aa, synthetic construct
WIMVVVE

SEQ ID NO: 288 - protein, 7 aa, synthetic construct
QEKDLLE

SEQ ID NO: 289 - protein, 7 aa, synthetic construct
SSAQLIE

SEQ ID NO: 290 - protein, 7 aa, synthetic construct
TGCGFLE

SEQ ID NO: 291 - protein, 7 aa, synthetic construct
VNGIVMD

SEQ ID NO: 292 - protein, 7 aa, synthetic construct
VGSGVVE

SEQ ID NO: 293 - protein, 7 aa, synthetic construct
FVRMLLE

SEQ ID NO: 294 - protein, 7 aa, synthetic construct
PGVVILE

SEQ ID NO: 295 - protein, 7 aa, synthetic construct
LAIVFQG

SEQ ID NO: 296 - protein, 7 aa, synthetic construct
SRTVFRA

SEQ ID NO: 297 - protein, 7 aa, synthetic construct
STTYMIE

SEQ ID NO: 298 - protein, 7 aa, synthetic construct
CLRPFIE

SEQ ID NO: 299 - protein, 7 aa, synthetic construct
DPQAVLE

SEQ ID NO: 300 - protein, 7 aa, synthetic construct
RPVTVLE

SEQ ID NO: 301 - protein, 7 aa, synthetic construct
RAGILLE

SEQ ID NO: 302 - protein, 7 aa, synthetic construct
VVGSVLE

SEQ ID NO: 303 - protein, 7 aa, synthetic construct
SRGITLE

SEQ ID NO: 304 - protein, 7 aa, synthetic construct
ERKYVLE

SEQ ID NO: 305 - protein, 7 aa, synthetic construct
DVRKQIE

SEQ ID NO: 306 - protein, 7 aa, synthetic construct
RRICFTD

SEQ ID NO: 307 - protein, 7 aa, synthetic construct
AMVLALE

SEQ ID NO: 308 - protein, 7 aa, synthetic construct
GKMWAIE

SEQ ID NO: 309 - protein, 7 aa, synthetic construct
NVLEVIG

SEQ ID NO: 310 - protein, 7 aa, synthetic construct
VVRRMSI

SEQ ID NO: 311 - protein, 7 aa, synthetic construct
DRGQVIE

SEQ ID NO: 312 - protein, 7 aa, synthetic construct
PHGSGSM

SEQ ID NO: 313 - protein, 7 aa, synthetic construct
ITGVILE

SEQ ID NO: 314 - protein, 7 aa, synthetic construct
CSDGPIE

SEQ ID NO: 315 - protein, 7 aa, synthetic construct
LDLTLIE

SEQ ID NO: 316 - protein, 7 aa, synthetic construct
KVAGILE

SEQ ID NO: 317 - protein, 7 aa, synthetic construct
EPVMCVE

SEQ ID NO: 318 - protein, 7 aa, synthetic construct
GVMGIIE

SEQ ID NO: 319 - protein, 7 aa, synthetic construct
LVSIILE

SEQ ID NO: 320 - protein, 7 aa, synthetic construct
ATRRVLE

SEQ ID NO: 321 - protein, 7 aa, synthetic construct
GVGMMIE

SEQ ID NO: 322 - protein, 7 aa, synthetic construct
KRLVFMD

SEQ ID NO: 323 - protein, 7 aa, synthetic construct
LSGFVVE

SEQ ID NO: 324 - protein, 7 aa, synthetic construct
DPSDHII

SEQ ID NO: 325 - protein, 7 aa, synthetic construct
MKVGMIE

SEQ ID NO: 326 - protein, 7 aa, synthetic construct
MHHCILE

SEQ ID NO: 327 - protein, 7 aa, synthetic construct
SVSQVVE

SEQ ID NO: 328 - protein, 7 aa, synthetic construct
NRIVFRD

SEQ ID NO: 329 - protein, 7 aa, synthetic construct
DGTTVIE

SEQ ID NO: 330 - protein, 7 aa, synthetic construct
SMDDVIE

SEQ ID NO: 331 - protein, 7 aa, synthetic construct
DIRFVLE

SEQ ID NO: 332 - protein, 7 aa, synthetic construct
LHVTFVE

SEQ ID NO: 333 - protein, 7 aa, synthetic construct
YTRHVLE

SEQ ID NO: 334 - protein, 7 aa, synthetic construct
GDHGTIE

SEQ ID NO: 335 - protein, 7 aa, synthetic construct
LIQRAIL

SEQ ID NO: 336 - protein, 7 aa, synthetic construct
GRIVFEN

SEQ ID NO: 337 - protein, 7 aa, synthetic construct
MATGVVE

SEQ ID NO: 338 - protein, 7 aa, synthetic construct
QNSNVIE

SEQ ID NO: 339 - protein, 7 aa, synthetic construct
TGGMICE

SEQ ID NO: 340 - protein, 7 aa, synthetic construct
FNLVFLD

SEQ ID NO: 341 - protein, 7 aa, synthetic construct
NNIVFRG

SEQ ID NO: 342 - protein, 7 aa, synthetic construct
SGAHILE

SEQ ID NO: 343 - protein, 7 aa, synthetic construct
MLGVVME

SEQ ID NO: 344 - protein, 7 aa, synthetic construct
NVLELVE

SEQ ID NO: 345 - protein, 7 aa, synthetic construct
FRLVFRS

SEQ ID NO: 346 - protein, 6 aa, synthetic construct
TDVRVE

SEQ ID NO: 347 - protein, 7 aa, synthetic construct
CSRAVLE

SEQ ID NO: 348 - protein, 7 aa, synthetic construct
NSVGALE

SEQ ID NO: 349 - protein, 7 aa, synthetic construct
VCDGLIE

SEQ ID NO: 350 - protein, 7 aa, synthetic construct
GVLRVIE

SEQ ID NO: 351 - protein, 7 aa, synthetic construct
KEVLLGR

SEQ ID NO: 352 - protein, 7 aa, synthetic construct
GRVVFKM

SEQ ID NO: 353 - protein, 7 aa, synthetic construct
THNNMLE

SEQ ID NO: 354 - protein, 7 aa, synthetic construct
DMRYSLV

SEQ ID NO: 355 - protein, 7 aa, synthetic construct
QRLLIGE

SEQ ID NO: 356 - protein, 7 aa, synthetic construct
VRSPVLE

SEQ ID NO: 357 - protein, 7 aa, synthetic construct
YRIVFAP

SEQ ID NO: 358 - protein, 7 aa, synthetic construct
DMVRVIE

SEQ ID NO: 359 - protein, 7 aa, synthetic construct
WISNVLE

SEQ ID NO: 360 - protein, 7 aa, synthetic construct
GPYRFLE

SEQ ID NO: 361 - protein, 7 aa, synthetic construct
VPGNMIE

SEQ ID NO: 362 - protein, 7 aa, synthetic construct
MRTVFQD

SEQ ID NO: 363 - protein, 7 aa, synthetic construct
VMGSIME

SEQ ID NO: 364 - protein, 7 aa, synthetic construct
ILDRVME

SEQ ID NO: 365 - protein, 7 aa, synthetic construct
NYIRPLE

SEQ ID NO: 366 - protein, 7 aa, synthetic construct
DALQAFE

SEQ ID NO: 367 - protein, 7 aa, synthetic construct
NRQRMLE

SEQ ID NO: 368 - protein, 7 aa, synthetic construct
DTGVVLE

SEQ ID NO: 369 - protein, 7 aa, synthetic construct
HAKNVLE

SEQ ID NO: 370 - protein, 7 aa, synthetic construct
TVDPVLE

SEQ ID NO: 371 - protein, 7 aa, synthetic construct
RHPMGAE

SEQ ID NO: 372 - protein, 7 aa, synthetic construct
PLHSVLE

SEQ ID NO: 373 - protein, 7 aa, synthetic construct
TGENMVF

SEQ ID NO: 374 - protein, 7 aa, synthetic construct
NKHQMLE

SEQ ID NO: 375 - protein, 7 aa, synthetic construct
SMKIIIE

SEQ ID NO: 376 - protein, 7 aa, synthetic construct
RLLGVIE

SEQ ID NO: 377 - protein, 7 aa, synthetic construct
NRVNVLE

SEQ ID NO: 378 - protein, 7 aa, synthetic construct
LLGRVIE

SEQ ID NO: 379 - protein, 7 aa, synthetic construct
VQGMIVE

SEQ ID NO: 380 - protein, 7 aa, synthetic construct
VEGVVLE

SEQ ID NO: 381 - protein, 7 aa, synthetic construct
LTGAIIE

SEQ ID NO: 382 - protein, 6 aa, synthetic construct
GMDFIE

SEQ ID NO: 383 - protein, 7 aa, synthetic construct
TNIVFRT

SEQ ID NO: 384 - protein, 7 aa, synthetic construct
SMHKMLE

SEQ ID NO: 385 - protein, 7 aa, synthetic construct
DSAVLIE

SEQ ID NO: 386 - protein, 7 aa, synthetic construct
EINNVLE

SEQ ID NO: 387 - protein, 7 aa, synthetic construct
NLKNMVE

SEQ ID NO: 388 - protein, 7 aa, synthetic construct
RAGYVME

SEQ ID NO: 389 - protein, 7 aa, synthetic construct
EINNGVE

SEQ ID NO: 390 - protein, 7 aa, synthetic construct
DRTVFKE

SEQ ID NO: 391 - protein, 7 aa, synthetic construct
NVTDVLE

SEQ ID NO: 392 - protein, 7 aa, synthetic construct
LGVGVLE

SEQ ID NO: 393 - protein, 7 aa, synthetic construct
IHGVVVE

SEQ ID NO: 394 - protein, 7 aa, synthetic construct
VSGIRAL

SEQ ID NO: 395 - protein, 7 aa, synthetic construct
PTGNKVE

SEQ ID NO: 396 - protein, 7 aa, synthetic construct
HRNRVVE

SEQ ID NO: 397 - protein, 7 aa, synthetic construct
IMGRTIE

SEQ ID NO: 398 - protein, 7 aa, synthetic construct
CKVTVLE

SEQ ID NO: 399 - protein, 7 aa, synthetic construct
YEGDVVE

SEQ ID NO: 400 - protein, 7 aa, synthetic construct
LRGRRIE

SEQ ID NO: 401 - protein, 7 aa, synthetic construct
LEQTIVE

SEQ ID NO: 402 - protein, 7 aa, synthetic construct
VATAPIE

SEQ ID NO: 403 - protein, 5 aa, synthetic construct
SSAIE

SEQ ID NO: 404 - protein, 7 aa, synthetic construct
CIMMLIE

SEQ ID NO: 405 - protein, 7 aa, synthetic construct
GVKKVIE

SEQ ID NO: 406 - protein, 7 aa, synthetic construct
IRWPVVE

SEQ ID NO: 407 - protein, 7 aa, synthetic construct
VMFQVVE

SEQ ID NO: 408 - protein, 7 aa, synthetic construct
LAGMVLE

SEQ ID NO: 409 - protein, 7 aa, synthetic construct
NHDLVLE

SEQ ID NO: 410 - protein, 7 aa, synthetic construct
SDVKGHG

SEQ ID NO: 411 - protein, 7 aa, synthetic construct
NVHDVIE

SEQ ID NO: 412 - protein, 7 aa, synthetic construct
ETGIVLE

SEQ ID NO: 413 - protein, 7 aa, synthetic construct
THRWVLE

SEQ ID NO: 414 - protein, 7 aa, synthetic construct
MRTVFVV

SEQ ID NO: 415 - protein, 7 aa, synthetic construct
GMGVILE

SEQ ID NO: 416 - protein, 7 aa, synthetic construct
SMRWVWA

SEQ ID NO: 417 - protein, 7 aa, synthetic construct
GGVHWLE

SEQ ID NO: 418 - protein, 7 aa, synthetic construct
SFASIIE

SEQ ID NO: 419 - protein, 7 aa, synthetic construct
RNGVILE

SEQ ID NO: 420 - protein, 7 aa, synthetic construct
MSGGILE

SEQ ID NO: 421 - protein, 7 aa, synthetic construct
TIHNILE

SEQ ID NO: 422 - protein, 7 aa, synthetic construct
KGGKLIE

SEQ ID NO: 423 - protein, 7 aa, synthetic construct
LGKRWME

SEQ ID NO: 424 - protein, 7 aa, synthetic construct
NKTGAVE

SEQ ID NO: 425 - protein, 7 aa, synthetic construct
IKGSVIE

SEQ ID NO: 426 - protein, 7 aa, synthetic construct
NLVDVLE

SEQ ID NO: 427 - protein, 7 aa, synthetic construct
RRIVFSD

SEQ ID NO: 428 - protein, 7 aa, synthetic construct
WRIVFKE

SEQ ID NO: 429 - protein, 7 aa, synthetic construct
CLNQVMI

SEQ ID NO: 430 - protein, 7 aa, synthetic construct
KVRAIVE

SEQ ID NO: 431 - protein, 7 aa, synthetic construct
MKGVVME

SEQ ID NO: 432 - protein, 7 aa, synthetic construct
AQGLMME

SEQ ID NO: 433 - protein, 7 aa, synthetic construct
VTGLMLC

SEQ ID NO: 434 - protein, 7 aa, synthetic construct
TFRHVVE

SEQ ID NO: 435 - protein, 7 aa, synthetic construct
MSNMLVI

SEQ ID NO: 436 - protein, 7 aa, synthetic construct
NDQPWME

SEQ ID NO: 437 - protein, 7 aa, synthetic construct
HLEDALE

SEQ ID NO: 438 - protein, 7 aa, synthetic construct
IKAQVVE

SEQ ID NO: 439 - protein, 7 aa, synthetic construct
DSRTFLE

SEQ ID NO: 440 - protein, 7 aa, synthetic construct
VRGVGLE

SEQ ID NO: 441 - protein, 7 aa, synthetic construct
VAGVLLE

SEQ ID NO: 442 - protein, 7 aa, synthetic construct
EVMRIVE

SEQ ID NO: 443 - protein, 7 aa, synthetic construct
NEGVVID

SEQ ID NO: 444 - protein, 7 aa, synthetic construct
ADQIVLE

SEQ ID NO: 445 - protein, 7 aa, synthetic construct
THAGLIE

SEQ ID NO: 446 - protein, 7 aa, synthetic construct
RHHGVVE

SEQ ID NO: 447 - protein, 7 aa, synthetic construct
NGDSVLE

SEQ ID NO: 448 - protein, 7 aa, synthetic construct
VQGIRIE

SEQ ID NO: 449 - protein, 7 aa, synthetic construct
PASSWVE

SEQ ID NO: 450 - protein, 7 aa, synthetic construct
RIDGAIE

SEQ ID NO: 451 - protein, 7 aa, synthetic construct
TTDNLIE

SEQ ID NO: 452 - protein, 7 aa, synthetic construct
RGVVVVE

SEQ ID NO: 453 - protein, 7 aa, synthetic construct
WMKGVIE

SEQ ID NO: 454 - protein, 7 aa, synthetic construct
GVRTIWY

SEQ ID NO: 455 - protein, 7 aa, synthetic construct
DIDMVIE

SEQ ID NO: 456 - protein, 7 aa, synthetic construct
DGKIVVE

SEQ ID NO: 457 - protein, 7 aa, synthetic construct
LLGILVD

SEQ ID NO: 458 - protein, 7 aa, synthetic construct
RVMEVLE

SEQ ID NO: 459 - protein, 7 aa, synthetic construct
VIGMVVE

SEQ ID NO: 460 - protein, 7 aa, synthetic construct
RTWGLIE

SEQ ID NO: 461 - protein, 7 aa, synthetic construct
STGRIIE

SEQ ID NO: 462 - protein, 7 aa, synthetic construct
KDGMRSW

SEQ ID NO: 463 - protein, 7 aa, synthetic construct
VKIVFKG

SEQ ID NO: 464 - protein, 7 aa, synthetic construct
FIGRVME

SEQ ID NO: 465 - protein, 7 aa, synthetic construct
IKAGALS

SEQ ID NO: 466 - protein, 7 aa, synthetic construct
SDDEVIE

SEQ ID NO: 467 - protein, 7 aa, synthetic construct
VRGVVLE

SEQ ID NO: 468 - protein, 7 aa, synthetic construct
RGQLVME

SEQ ID NO: 469 - protein, 7 aa, synthetic construct
RPVGVIE

SEQ ID NO: 470 - protein, 7 aa, synthetic construct
IRGNQLE

SEQ ID NO: 471 - protein, 7 aa, synthetic construct
WGGDAIE

SEQ ID NO: 472 - protein, 7 aa, synthetic construct
LRLVFQP

SEQ ID NO: 473 - protein, 7 aa, synthetic construct
RMSVIIE

SEQ ID NO: 474 - protein, 7 aa, synthetic construct
GNEAKVE

SEQ ID NO: 475 - protein, 7 aa, synthetic construct
MLNGMLE

SEQ ID NO: 476 - protein, 7 aa, synthetic construct
DTWWWME

SEQ ID NO: 477 - protein, 7 aa, synthetic construct
MGPLWLE

SEQ ID NO: 478 - protein, 7 aa, synthetic construct
RRLVFES

SEQ ID NO: 479 - protein, 7 aa, synthetic construct
IANLWLE

SEQ ID NO: 480 - protein, 7 aa, synthetic construct
GIAKIVE

SEQ ID NO: 481 - protein, 7 aa, synthetic construct
VIDKILE

SEQ ID NO: 482 - protein, 7 aa, synthetic construct
CTNDMLE

SEQ ID NO: 483 - protein, 7 aa, synthetic construct
KKNVEVR

SEQ ID NO: 484 - protein, 7 aa, synthetic construct
CINRFVE

SEQ ID NO: 485 - protein, 7 aa, synthetic construct
LEEGLLE

SEQ ID NO: 486 - protein, 7 aa, synthetic construct
LRDGTLE

SEQ ID NO: 487 - protein, 4 aa, synthetic construct
TFME

SEQ ID NO: 488 - protein, 7 aa, synthetic construct
NVGSMLE

SEQ ID NO: 489 - protein, 7 aa, synthetic construct
IVEGMFE

SEQ ID NO: 490 - protein, 7 aa, synthetic construct
RRTSVLE

SEQ ID NO: 491 - protein, 7 aa, synthetic construct
NDLIVVE

SEQ ID NO: 492 - protein, 7 aa, synthetic construct
VDGGIIE

SEQ ID NO: 493 - protein, 7 aa, synthetic construct
ATKSLME

SEQ ID NO: 494 - protein, 7 aa, synthetic construct
LLQGVVE

SEQ ID NO: 495 - protein, 7 aa, synthetic construct
GRARILE

SEQ ID NO: 496 - protein, 7 aa, synthetic construct
TQARQIE

SEQ ID NO: 497 - protein, 7 aa, synthetic construct
KRSSILE

SEQ ID NO: 498 - protein, 7 aa, synthetic construct
ILGDIVE

SEQ ID NO: 499 - protein, 7 aa, synthetic construct
QGKLVIE

SEQ ID NO: 500 - protein, 7 aa, synthetic construct
SIGSILE

SEQ ID NO: 501 - protein, 7 aa, synthetic construct
TRGNSME

SEQ ID NO: 502 - protein, 7 aa, synthetic construct
IRGFVLE

SEQ ID NO: 503 - protein, 7 aa, synthetic construct
GINVVIE

SEQ ID NO: 504 - protein, 7 aa, synthetic construct
HRLVFMC

SEQ ID NO: 505 - protein, 7 aa, synthetic construct
TTLTVLE

SEQ ID NO: 506 - protein, 7 aa, synthetic construct
VRGETIE

SEQ ID NO: 507 - protein, 7 aa, synthetic construct
GMATQIE

SEQ ID NO: 508 - protein, 7 aa, synthetic construct
NVSYYDL

SEQ ID NO: 509 - protein, 7 aa, synthetic construct
ASDTIVY

SEQ ID NO: 510 - protein, 6 aa, synthetic construct
HVMTLE

SEQ ID NO: 511 - protein, 7 aa, synthetic construct
APGDILE

SEQ ID NO: 512 - protein, 7 aa, synthetic construct
TGRYTVE

SEQ ID NO: 513 - protein, 7 aa, synthetic construct
IAGEVIE

SEQ ID NO: 514 - protein, 7 aa, synthetic construct
HNVGLIE

SEQ ID NO: 515 - protein, 7 aa, synthetic construct
DMPGMLE

SEQ ID NO: 516 - protein, 7 aa, synthetic construct
DLSVALE

SEQ ID NO: 517 - protein, 7 aa, synthetic construct
VHGIMIE

SEQ ID NO: 518 - protein, 7 aa, synthetic construct
NLAGMME

SEQ ID NO: 519 - protein, 7 aa, synthetic construct
MVGVVIE

SEQ ID NO: 520 - protein, 7 aa, synthetic construct
FGGVILE

SEQ ID NO: 521 - protein, 7 aa, synthetic construct
VCKDILE

SEQ ID NO: 522 - protein, 7 aa, synthetic construct
NRIVFEA

SEQ ID NO: 523 - protein, 7 aa, synthetic construct
GQDGVLE

SEQ ID NO: 524 - protein, 7 aa, synthetic construct
SKTCMLE

SEQ ID NO: 525 - protein, 7 aa, synthetic construct
DRKKVLE

SEQ ID NO: 526 - protein, 7 aa, synthetic construct
IKGLPIE

SEQ ID NO: 527 - protein, 7 aa, synthetic construct
GIVNVVE

SEQ ID NO: 528 - protein, 7 aa, synthetic construct
MRVGLIE

SEQ ID NO: 529 - protein, 7 aa, synthetic construct
LKAVVIE

SEQ ID NO: 530 - protein, 7 aa, synthetic construct
RSGQVIE

SEQ ID NO: 531 - protein, 7 aa, synthetic construct
WKGRLME

SEQ ID NO: 532 - protein, 7 aa, synthetic construct
DAKTFCN

SEQ ID NO: 533 - protein, 7 aa, synthetic construct
QVHGVIE

SEQ ID NO: 534 - protein, 7 aa, synthetic construct
SDRPYIE

SEQ ID NO: 535 - protein, 7 aa, synthetic construct
VPSAIVE

SEQ ID NO: 536 - protein, 7 aa, synthetic construct
QVFDSNW

SEQ ID NO: 537 - protein, 7 aa, synthetic construct
RVGNVME

SEQ ID NO: 538 - protein, 7 aa, synthetic construct
FRQVFLG

SEQ ID NO: 539 - protein, 7 aa, synthetic construct
IVAYVIE

SEQ ID NO: 540 - protein, 7 aa, synthetic construct
TDGNGIE

SEQ ID NO: 541 - protein, 7 aa, synthetic construct
VPGVHIE

SEQ ID NO: 542 - protein, 7 aa, synthetic construct
SISGALE

SEQ ID NO: 543 - protein, 7 aa, synthetic construct
MGADVLE

SEQ ID NO: 544 - protein, 7 aa, synthetic construct
SPRVVLE

SEQ ID NO: 545 - protein, 7 aa, synthetic construct
KVCDAIE

SEQ ID NO: 546 - protein, 7 aa, synthetic construct
DMGRGIE

SEQ ID NO: 547 - protein, 7 aa, synthetic construct
RSGIVME

SEQ ID NO: 548 - protein, 7 aa, synthetic construct
EARNLMI

SEQ ID NO: 549 - protein, 7 aa, synthetic construct
NVANVIE

SEQ ID NO: 550 - protein, 7 aa, synthetic construct
RHDPVLE

SEQ ID NO: 551 - protein, 7 aa, synthetic construct
GRVVMMV

SEQ ID NO: 552 - protein, 7 aa, synthetic construct
AIGDLIE

SEQ ID NO: 553 - protein, 7 aa, synthetic construct
HARYVME

SEQ ID NO: 554 - protein, 7 aa, synthetic construct
GPRPFVI

SEQ ID NO: 555 - protein, 7 aa, synthetic construct
DRKAVIE

SEQ ID NO: 556 - protein, 7 aa, synthetic construct
ARIVFLA

SEQ ID NO: 557 - protein, 7 aa, synthetic construct
SSHVPIE

SEQ ID NO: 558 - protein, 7 aa, synthetic construct
SGKDVLE

SEQ ID NO: 559 - protein, 7 aa, synthetic construct
GLSIVLE

SEQ ID NO: 560 - protein, 7 aa, synthetic construct
LRPAVIE

SEQ ID NO: 561 - protein, 7 aa, synthetic construct
QRIVFAD

SEQ ID NO: 562 - protein, 7 aa, synthetic construct
GRIVFVD

SEQ ID NO: 563 - protein, 7 aa, synthetic construct
GQGFGYH

SEQ ID NO: 564 - protein, 7 aa, synthetic construct
SGSHLIE

SEQ ID NO: 565 - protein, 7 aa, synthetic construct
TCGVMLE

SEQ ID NO: 566 - protein, 7 aa, synthetic construct
SLAVVVE

SEQ ID NO: 567 - protein, 7 aa, synthetic construct
RGVMVLE

SEQ ID NO: 568 - protein, 7 aa, synthetic construct
DRLVFVP

SEQ ID NO: 569 - protein, 7 aa, synthetic construct
NGLMRGL

SEQ ID NO: 570 - protein, 7 aa, synthetic construct
ARLVFID

SEQ ID NO: 571 - protein, 7 aa, synthetic construct
MRVVFLQ

SEQ ID NO: 572 - protein, 7 aa, synthetic construct
VKRGVIE

SEQ ID NO: 573 - protein, 7 aa, synthetic construct
RSSVRYV

SEQ ID NO: 574 - protein, 6 aa, synthetic construct
RLVFRI

SEQ ID NO: 575 - protein, 7 aa, synthetic construct
YTGVVLE

SEQ ID NO: 576 - protein, 7 aa, synthetic construct
FRFVFRD

SEQ ID NO: 577 - protein, 7 aa, synthetic construct
NRIVFRP

SEQ ID NO: 578 - protein, 7 aa, synthetic construct
NQVRMLE

SEQ ID NO: 579 - protein, 7 aa, synthetic construct
LAFPPLE

SEQ ID NO: 580 - protein, 7 aa, synthetic construct
AGVGVIE

SEQ ID NO: 581 - protein, 7 aa, synthetic construct
HRGWLVE

SEQ ID NO: 582 - protein, 7 aa, synthetic construct
DIAALLE

SEQ ID NO: 583 - protein, 7 aa, synthetic construct
LEEVVME

SEQ ID NO: 584 - protein, 7 aa, synthetic construct
GIFAALE

SEQ ID NO: 585 - protein, 7 aa, synthetic construct
IRFVFRT

SEQ ID NO: 586 - protein, 7 aa, synthetic construct
TRLVFVG

SEQ ID NO: 587 - protein, 7 aa, synthetic construct
LRLVFRM

SEQ ID NO: 588 - protein, 7 aa, synthetic construct
HRIVFRE

SEQ ID NO: 589 - protein, 7 aa, synthetic construct
HRFVFID

SEQ ID NO: 590 - protein, 7 aa, synthetic construct
HSERMLE

SEQ ID NO: 591 - protein, 7 aa, synthetic construct
GRLVFRD

SEQ ID NO: 592 - protein, 7 aa, synthetic construct
PTGVTVE

SEQ ID NO: 593 - protein, 7 aa, synthetic construct
VGRVVME

SEQ ID NO: 594 - protein, 7 aa, synthetic construct
DICDVIE

SEQ ID NO: 595 - protein, 7 aa, synthetic construct
LVGNVME

SEQ ID NO: 596 - protein, 7 aa, synthetic construct
GMSNHIE

SEQ ID NO: 597 - protein, 7 aa, synthetic construct
NEASIIE

SEQ ID NO: 598 - protein, 7 aa, synthetic construct
YCDRVVE

SEQ ID NO: 599 - protein, 7 aa, synthetic construct
LASGLVE

SEQ ID NO: 600 - protein, 7 aa, synthetic construct
DNNRFIE

SEQ ID NO: 601 - protein, 7 aa, synthetic construct
LSQGVLE

SEQ ID NO: 602 - protein, 7 aa, synthetic construct
EDHVKVE

SEQ ID NO: 603 - protein, 7 aa, synthetic construct
VKDRVVE

SEQ ID NO: 604 - protein, 7 aa, synthetic construct
DMGRVLE

SEQ ID NO: 605 - protein, 7 aa, synthetic construct
IGLHIME

SEQ ID NO: 606 - protein, 7 aa, synthetic construct
IVRASRI

SEQ ID NO: 607 - protein, 7 aa, synthetic construct
VMGVTIE

SEQ ID NO: 608 - protein, 7 aa, synthetic construct
LSEVKGI

SEQ ID NO: 609 - protein, 7 aa, synthetic construct
THGTWME

SEQ ID NO: 610 - protein, 7 aa, synthetic construct
MCVMPLE

SEQ ID NO: 611 - protein, 7 aa, synthetic construct
VDGCILE

SEQ ID NO: 612 - protein, 7 aa, synthetic construct
HPAQFME

SEQ ID NO: 613 - protein, 7 aa, synthetic construct
LSDKAIE

SEQ ID NO: 614 - protein, 7 aa, synthetic construct
RRDCALE

SEQ ID NO: 615 - protein, 7 aa, synthetic construct
HINTVME

SEQ ID NO: 616 - protein, 7 aa, synthetic construct
KRIVFVE

SEQ ID NO: 617 - protein, 7 aa, synthetic construct
IVSTPIE

SEQ ID NO: 618 - protein, 7 aa, synthetic construct
WMEGVLE

SEQ ID NO: 619 - protein, 7 aa, synthetic construct
WRLVFSG

SEQ ID NO: 620 - protein, 7 aa, synthetic construct
NAHQVVE

SEQ ID NO: 621 - protein, 7 aa, synthetic construct
VRIVFRR

SEQ ID NO: 622 - protein, 7 aa, synthetic construct
SGGPVLE

SEQ ID NO: 623 - protein, 7 aa, synthetic construct
GLERVLE

SEQ ID NO: 624 - protein, 7 aa, synthetic construct
VAETAIE

SEQ ID NO: 625 - protein, 7 aa, synthetic construct
RDRCHIE

SEQ ID NO: 626 - protein, 7 aa, synthetic construct
MGVSIVE

SEQ ID NO: 627 - protein, 7 aa, synthetic construct
MRHVFVD

SEQ ID NO: 628 - protein, 7 aa, synthetic construct
GAQGFAY

SEQ ID NO: 629 - protein, 7 aa, synthetic construct
CAGFMLE

SEQ ID NO: 630 - protein, 7 aa, synthetic construct
VAGIMLE

SEQ ID NO: 631 - protein, 7 aa, synthetic construct
EGARVLE

SEQ ID NO: 632 - protein, 7 aa, synthetic construct
SRVVFSD

SEQ ID NO: 633 - protein, 7 aa, synthetic construct
NANRVLE

SEQ ID NO: 634 - protein, 7 aa, synthetic construct
TIDYLRP

SEQ ID NO: 635 - protein, 7 aa, synthetic construct
TPSGSLE

SEQ ID NO: 636 - protein, 7 aa, synthetic construct
RTGTVVE

SEQ ID NO: 637 - protein, 7 aa, synthetic construct
GCVMLME

SEQ ID NO: 638 - protein, 7 aa, synthetic construct
DVPLVIE

SEQ ID NO: 639 - protein, 7 aa, synthetic construct
GRIVFLM

SEQ ID NO: 640 - protein, 7 aa, synthetic construct
YNGPVTW

SEQ ID NO: 641 - protein, 7 aa, synthetic construct
VVTNMIE

SEQ ID NO: 642 - protein, 7 aa, synthetic construct
ILGMVME

SEQ ID NO: 643 - protein, 7 aa, synthetic construct
VKGTCIE

SEQ ID NO: 644 - protein, 7 aa, synthetic construct
GRIVFMG

SEQ ID NO: 645 - protein, 7 aa, synthetic construct
MLSGALE

SEQ ID NO: 646 - protein, 7 aa, synthetic construct
RRIVFIA

SEQ ID NO: 647 - protein, 7 aa, synthetic construct
NRIVFHD

SEQ ID NO: 648 - protein, 7 aa, synthetic construct
KGKPVVE

SEQ ID NO: 649 - protein, 7 aa, synthetic construct
NAMTRSS

SEQ ID NO: 650 - protein, 7 aa, synthetic construct
LAGPVLE

SEQ ID NO: 651 - protein, 7 aa, synthetic construct
LRFVFVD

SEQ ID NO: 652 - protein, 7 aa, synthetic construct
RRIVFSA

SEQ ID NO: 653 - protein, 7 aa, synthetic construct
IMAMILE

SEQ ID NO: 654 - protein, 7 aa, synthetic construct
YRLVFNG

SEQ ID NO: 655 - protein, 7 aa, synthetic construct
VFHDWFR

SEQ ID NO: 656 - protein, 5 aa, synthetic construct
DGAIE

SEQ ID NO: 657 - protein, 7 aa, synthetic construct
KVGVVVE

SEQ ID NO: 658 - protein, 7 aa, synthetic construct
TRCNVIE

SEQ ID NO: 659 - protein, 7 aa, synthetic construct
VRFVFRT

SEQ ID NO: 660 - protein, 7 aa, synthetic construct
HHDTVLE

SEQ ID NO: 661 - protein, 7 aa, synthetic construct
QVHAVLE

SEQ ID NO: 662 - protein, 7 aa, synthetic construct
RLNHVLE

SEQ ID NO: 663 - protein, 7 aa, synthetic construct
LVPDIIE

SEQ ID NO: 664 - protein, 7 aa, synthetic construct
SWFWLIE

SEQ ID NO: 665 - protein, 7 aa, synthetic construct
NHVIVIE

SEQ ID NO: 666 - protein, 7 aa, synthetic construct
VLFVFRA

SEQ ID NO: 667 - protein, 7 aa, synthetic construct
TGNRLME

SEQ ID NO: 668 - protein, 7 aa, synthetic construct
GSNTIAK

SEQ ID NO: 669 - protein, 7 aa, synthetic construct
DIVHVIE

SEQ ID NO: 670 - protein, 7 aa, synthetic construct
LTVGVLE

SEQ ID NO: 671 - protein, 7 aa, synthetic construct
TIVAVVE

SEQ ID NO: 672 - protein, 7 aa, synthetic construct
AAGLVVE

SEQ ID NO: 673 - protein, 7 aa, synthetic construct
IADGLIE

SEQ ID NO: 674 - protein, 7 aa, synthetic construct
SSGEVLE

SEQ ID NO: 675 - protein, 7 aa, synthetic construct
SVDVTSV

SEQ ID NO: 676 - protein, 7 aa, synthetic construct
NRIVFVT

SEQ ID NO: 677 - protein, 7 aa, synthetic construct
NVNYLLE

SEQ ID NO: 678 - protein, 7 aa, synthetic construct
IGWTVWF

SEQ ID NO: 679 - protein, 7 aa, synthetic construct
GRIVFRR

SEQ ID NO: 680 - protein, 7 aa, synthetic construct
SHVEVME

SEQ ID NO: 681 - protein, 7 aa, synthetic construct
KRIVFIH

SEQ ID NO: 682 - protein, 7 aa, synthetic construct
NATTLVE

SEQ ID NO: 683 - protein, 5 aa, synthetic construct
NNMME

SEQ ID NO: 684 - protein, 7 aa, synthetic construct
LIGSAIE

SEQ ID NO: 685 - protein, 7 aa, synthetic construct
SKEGRID

SEQ ID NO: 686 - protein, 7 aa, synthetic construct
SYDIGAR

SEQ ID NO: 687 - protein, 7 aa, synthetic construct
MGMVTME

SEQ ID NO: 688 - protein, 7 aa, synthetic construct
KKLEFIE

SEQ ID NO: 689 - protein, 5 aa, synthetic construct
AGVLE

SEQ ID NO: 690 - protein, 7 aa, synthetic construct
NEALVVE

SEQ ID NO: 691 - protein, 7 aa, synthetic construct
NMAVLVE

SEQ ID NO: 692 - protein, 7 aa, synthetic construct
LYRSYLE

SEQ ID NO: 693 - protein, 7 aa, synthetic construct
NRGLRVE

SEQ ID NO: 694 - protein, 7 aa, synthetic construct
HSGLTLE

SEQ ID NO: 695 - protein, 7 aa, synthetic construct
SYERLVE

SEQ ID NO: 696 - protein, 7 aa, synthetic construct
VRGGLVE

SEQ ID NO: 697 - protein, 7 aa, synthetic construct
AGGKRIE

SEQ ID NO: 698 - protein, 7 aa, synthetic construct
VNGYVVD

SEQ ID NO: 699 - protein, 7 aa, synthetic construct
MRGSVVE

SEQ ID NO: 700 - protein, 7 aa, synthetic construct
VRALIME

SEQ ID NO: 701 - protein, 7 aa, synthetic construct
LMDGMME

SEQ ID NO: 702 - protein, 7 aa, synthetic construct
NESCWLE

SEQ ID NO: 703 - protein, 7 aa, synthetic construct
PSSEVME

SEQ ID NO: 704 - protein, 7 aa, synthetic construct
RLELMLE

SEQ ID NO: 705 - protein, 7 aa, synthetic construct
VALSSVI

SEQ ID NO: 706 - protein, 7 aa, synthetic construct
NREFLLE

SEQ ID NO: 707 - protein, 7 aa, synthetic construct
LKDFVME

SEQ ID NO: 708 - protein, 7 aa, synthetic construct
VRGNVIE

SEQ ID NO: 709 - protein, 7 aa, synthetic construct
RRVIPRF

SEQ ID NO: 710 - protein, 7 aa, synthetic construct
GCTRVID

SEQ ID NO: 711 - protein, 7 aa, synthetic construct
HGQAVVE

SEQ ID NO: 712 - protein, 7 aa, synthetic construct
MRNTIIE

SEQ ID NO: 713 - protein, 7 aa, synthetic construct
NILRFIE

SEQ ID NO: 714 - protein, 7 aa, synthetic construct
GMVKMLG

SEQ ID NO: 715 - protein, 7 aa, synthetic construct
DMLGKEY

SEQ ID NO: 716 - protein, 7 aa, synthetic construct
EMLVPIE

SEQ ID NO: 717 - protein, 7 aa, synthetic construct
KMGFVVE

SEQ ID NO: 718 - protein, 7 aa, synthetic construct
DTLHVIE

SEQ ID NO: 719 - protein, 7 aa, synthetic construct
GNVSILE

SEQ ID NO: 720 - protein, 7 aa, synthetic construct
LVYKVME

SEQ ID NO: 721 - protein, 7 aa, synthetic construct
MRGVLLG

SEQ ID NO: 722 - protein, 7 aa, synthetic construct
VIDGIME

SEQ ID NO: 723 - protein, 7 aa, synthetic construct
MVRDVFE

SEQ ID NO: 724 - protein, 7 aa, synthetic construct
DLRAVME

SEQ ID NO: 725 - protein, 7 aa, synthetic construct
MRIVFLR

SEQ ID NO: 726 - protein, 7 aa, synthetic construct
DVGNTIE

SEQ ID NO: 727 - protein, 7 aa, synthetic construct
RRADVVE

SEQ ID NO: 728 - protein, 7 aa, synthetic construct
MRIVFVG

SEQ ID NO: 729 - protein, 4 aa, synthetic construct
VLLE

SEQ ID NO: 730 - protein, 7 aa, synthetic construct
DHSKVIE

SEQ ID NO: 731 - protein, 7 aa, synthetic construct
GEFEMIE

SEQ ID NO: 732 - protein, 7 aa, synthetic construct
LWGVVME

SEQ ID NO: 733 - protein, 7 aa, synthetic construct
KRGITVE

SEQ ID NO: 734 - protein, 7 aa, synthetic construct
SSDRIIE

SEQ ID NO: 735 - protein, 7 aa, synthetic construct
RMAKVLE

SEQ ID NO: 736 - protein, 7 aa, synthetic construct
VEDQVLE

SEQ ID NO: 737 - protein, 7 aa, synthetic construct
LIGVWLD

SEQ ID NO: 738 - protein, 7 aa, synthetic construct
RVGVALE

SEQ ID NO: 739 - protein, 7 aa, synthetic construct
SRVVFRD

SEQ ID NO: 740 - protein, 7 aa, synthetic construct
YGLCGLE

SEQ ID NO: 741 - protein, 7 aa, synthetic construct
DLRNPTV

SEQ ID NO: 742 - protein, 7 aa, synthetic construct
DVRDVLE

SEQ ID NO: 743 - protein, 7 aa, synthetic construct
GNGCVID

SEQ ID NO: 744 - protein, 7 aa, synthetic construct
AFGNIIE

SEQ ID NO: 745 - protein, 7 aa, synthetic construct
GRIVFRN

SEQ ID NO: 746 - protein, 7 aa, synthetic construct
LVRYAIE

SEQ ID NO: 747 - protein, 7 aa, synthetic construct
LVGRLIE

SEQ ID NO: 748 - protein, 7 aa, synthetic construct
NRTLVLE

SEQ ID NO: 749 - protein, 7 aa, synthetic construct
GFRVVLE

SEQ ID NO: 750 - protein, 7 aa, synthetic construct
AGVAMWF

SEQ ID NO: 751 - protein, 7 aa, synthetic construct
TGNVVLE

SEQ ID NO: 752 - protein, 7 aa, synthetic construct
GVALPME

SEQ ID NO: 753 - protein, 7 aa, synthetic construct
LWGPVVE

SEQ ID NO: 754 - protein, 7 aa, synthetic construct
MRIVFRS

SEQ ID NO: 755 - protein, 7 aa, synthetic construct
NNGVVIE

SEQ ID NO: 756 - protein, 7 aa, synthetic construct
SRIVFLP

SEQ ID NO: 757 - protein, 7 aa, synthetic construct
TALNVIE

SEQ ID NO: 758 - protein, 7 aa, synthetic construct
RRIVFHN

SEQ ID NO: 759 - protein, 7 aa, synthetic construct
HCSGAIE

SEQ ID NO: 760 - protein, 7 aa, synthetic construct
ERIVFRK

SEQ ID NO: 761 - protein, 7 aa, synthetic construct
WRLVFVQ

SEQ ID NO: 762 - protein, 7 aa, synthetic construct
INGTMLE

SEQ ID NO: 763 - protein, 7 aa, synthetic construct
LTGMRVE

SEQ ID NO: 764 - protein, 7 aa, synthetic construct
GIAGVLE

SEQ ID NO: 765 - protein, 7 aa, synthetic construct
MRVVFMP

SEQ ID NO: 766 - protein, 7 aa, synthetic construct
HLTTVIE

SEQ ID NO: 767 - protein, 7 aa, synthetic construct
IERLEGS

SEQ ID NO: 768 - protein, 7 aa, synthetic construct
GMVVFLD

SEQ ID NO: 769 - protein, 7 aa, synthetic construct
MRGSILE

SEQ ID NO: 770 - protein, 7 aa, synthetic construct
GLDAMME

SEQ ID NO: 771 - protein, 7 aa, synthetic construct
EGAGVIE

SEQ ID NO: 772 - protein, 7 aa, synthetic construct
SLDIVLE

SEQ ID NO: 773 - protein, 7 aa, synthetic construct
GVTGLLE

SEQ ID NO: 774 - protein, 7 aa, synthetic construct
RDVLVLE

SEQ ID NO: 775 - protein, 7 aa, synthetic construct
KLPPILE

SEQ ID NO: 776 - protein, 7 aa, synthetic construct
LWVHIVE

SEQ ID NO: 777 - protein, 7 aa, synthetic construct
EDNTMIE

SEQ ID NO: 778 - protein, 7 aa, synthetic construct
PDGSPLE

SEQ ID NO: 779 - protein, 7 aa, synthetic construct
SNFNPLE

SEQ ID NO: 780 - protein, 7 aa, synthetic construct
PRDGVVE

SEQ ID NO: 781 - protein, 7 aa, synthetic construct
SVMGSIE

SEQ ID NO: 782 - protein, 7 aa, synthetic construct
RGPVVME

SEQ ID NO: 783 - protein, 7 aa, synthetic construct
IGGGMIE

SEQ ID NO: 784 - protein, 7 aa, synthetic construct
ARDGSLE

SEQ ID NO: 785 - protein, 7 aa, synthetic construct
LDNEVAT

SEQ ID NO: 786 - protein, 7 aa, synthetic construct
ILDQVIE

SEQ ID NO: 787 - protein, 7 aa, synthetic construct
TQGVPVG

SEQ ID NO: 788 - protein, 7 aa, synthetic construct
KHNYIVE

SEQ ID NO: 789 - protein, 7 aa, synthetic construct
REHTVIE

SEQ ID NO: 790 - protein, 7 aa, synthetic construct
SRGLVCE

SEQ ID NO: 791 - protein, 7 aa, synthetic construct
RLRVVVE

SEQ ID NO: 792 - protein, 7 aa, synthetic construct
CSEVAMY

SEQ ID NO: 793 - protein, 7 aa, synthetic construct
MTGLVLE

SEQ ID NO: 794 - protein, 7 aa, synthetic construct
LTRGIHE

SEQ ID NO: 795 - protein, 7 aa, synthetic construct
SRGHVIE

SEQ ID NO: 796 - protein, 7 aa, synthetic construct
VGTDVLE

SEQ ID NO: 797 - protein, 7 aa, synthetic construct
MEGMVVE

SEQ ID NO: 798 - protein, 7 aa, synthetic construct
EPKLIVD

SEQ ID NO: 799 - protein, 7 aa, synthetic construct
VSDKVLE

SEQ ID NO: 800 - protein, 7 aa, synthetic construct
DAGIILE

SEQ ID NO: 801 - protein, 7 aa, synthetic construct
ALVRVME

SEQ ID NO: 802 - protein, 7 aa, synthetic construct
YASELIE

SEQ ID NO: 803 - protein, 7 aa, synthetic construct
TERAALE

SEQ ID NO: 804 - protein, 7 aa, synthetic construct
PSGAILE

SEQ ID NO: 805 - protein, 7 aa, synthetic construct
SRMRVVE

SEQ ID NO: 806 - protein, 7 aa, synthetic construct
SKEGLIE

SEQ ID NO: 807 - protein, 7 aa, synthetic construct
VQGTPME

SEQ ID NO: 808 - protein, 7 aa, synthetic construct
CSRRVIE

SEQ ID NO: 809 - protein, 7 aa, synthetic construct
WWKWVGE

SEQ ID NO: 810 - protein, 7 aa, synthetic construct
QTSRVLE

SEQ ID NO: 811 - protein, 7 aa, synthetic construct
REVQGIE

SEQ ID NO: 812 - protein, 7 aa, synthetic construct
TTGRTLE

SEQ ID NO: 813 - protein, 7 aa, synthetic construct
QVESMLE

SEQ ID NO: 814 - protein, 7 aa, synthetic construct
QVLFLTA

SEQ ID NO: 815 - protein, 7 aa, synthetic construct
LARNVLE

SEQ ID NO: 816 - protein, 7 aa, synthetic construct
VNDGYLE

SEQ ID NO: 817 - protein, 7 aa, synthetic construct
NVVWVLE

SEQ ID NO: 818 - protein, 7 aa, synthetic construct
VGSRCIE

SEQ ID NO: 819 - protein, 7 aa, synthetic construct
LVRRIIH

SEQ ID NO: 820 - protein, 7 aa, synthetic construct
KTGVTLE

SEQ ID NO: 821 - protein, 7 aa, synthetic construct
HVKEVME

SEQ ID NO: 822 - protein, 7 aa, synthetic construct
IGCRVLE

SEQ ID NO: 823 - protein, 6 aa, synthetic construct
EVTIIE

SEQ ID NO: 824 - protein, 7 aa, synthetic construct
EWAYWIE

SEQ ID NO: 825 - protein, 7 aa, synthetic construct
LLHRVME

SEQ ID NO: 826 - protein, 7 aa, synthetic construct
EDVLVGV

SEQ ID NO: 827 - protein, 7 aa, synthetic construct
VVGCVLE

SEQ ID NO: 828 - protein, 7 aa, synthetic construct
DGHGLIE

SEQ ID NO: 829 - protein, 7 aa, synthetic construct
GNVIYLE

SEQ ID NO: 830 - protein, 7 aa, synthetic construct
MGKNILE

SEQ ID NO: 831 - protein, 7 aa, synthetic construct
GHAKPIE

SEQ ID NO: 832 - protein, 7 aa, synthetic construct
DVHFVLE

SEQ ID NO: 833 - protein, 7 aa, synthetic construct
MLGLILE

SEQ ID NO: 834 - protein, 7 aa, synthetic construct
TWRRMLE

SEQ ID NO: 835 - protein, 7 aa, synthetic construct
YRGTVVE

SEQ ID NO: 836 - protein, 7 aa, synthetic construct
RIIDVLE

SEQ ID NO: 837 - protein, 7 aa, synthetic construct
CVRVFVE

SEQ ID NO: 838 - protein, 7 aa, synthetic construct
TLCALIE

SEQ ID NO: 839 - protein, 5 aa, synthetic construct
HNMLE

SEQ ID NO: 840 - protein, 7 aa, synthetic construct
KCGIVLE

SEQ ID NO: 841 - protein, 7 aa, synthetic construct
HFNPWLE

SEQ ID NO: 842 - protein, 7 aa, synthetic construct
TKGVVLE

SEQ ID NO: 843 - protein, 7 aa, synthetic construct
YGGNLIE

SEQ ID NO: 844 - protein, 7 aa, synthetic construct
RGNGRLR

SEQ ID NO: 845 - protein, 7 aa, synthetic construct
LTDRVME

SEQ ID NO: 846 - protein, 7 aa, synthetic construct
HRDRFIE

SEQ ID NO: 847 - protein, 7 aa, synthetic construct
VRETIIE

SEQ ID NO: 848 - protein, 7 aa, synthetic construct
ERLVFRE

SEQ ID NO: 849 - protein, 7 aa, synthetic construct
DSGVMLE

SEQ ID NO: 850 - protein, 7 aa, synthetic construct
QRIVFQG

SEQ ID NO: 851 - protein, 7 aa, synthetic construct
MHVSWME

SEQ ID NO: 852 - protein, 7 aa, synthetic construct
NVLGLME

SEQ ID NO: 853 - protein, 7 aa, synthetic construct
VMMGSGV

SEQ ID NO: 854 - protein, 7 aa, synthetic construct
SLGCVIE

SEQ ID NO: 855 - protein, 7 aa, synthetic construct
LTGPSME

SEQ ID NO: 856 - protein, 7 aa, synthetic construct
MVAVVLE

SEQ ID NO: 857 - protein, 7 aa, synthetic construct
VQHGLLE

SEQ ID NO: 858 - protein, 6 aa, synthetic construct
LVHVVE

SEQ ID NO: 859 - protein, 7 aa, synthetic construct
VPPVAVE

SEQ ID NO: 860 - protein, 7 aa, synthetic construct
MNGVTVE

SEQ ID NO: 861 - protein, 7 aa, synthetic construct
PVANTLE

SEQ ID NO: 862 - protein, 7 aa, synthetic construct
LTTMPIE

SEQ ID NO: 863 - protein, 7 aa, synthetic construct
MKGHTLE

SEQ ID NO: 864 - protein, 7 aa, synthetic construct
GEVRCIE

SEQ ID NO: 865 - protein, 7 aa, synthetic construct
IMGIMVE

SEQ ID NO: 866 - protein, 7 aa, synthetic construct
RVIRVIE

SEQ ID NO: 867 - protein, 7 aa, synthetic construct
VTVRWWD

SEQ ID NO: 868 - protein, 7 aa, synthetic construct
RTGTMIE

SEQ ID NO: 869 - protein, 7 aa, synthetic construct
IRMLVIE

SEQ ID NO: 870 - protein, 7 aa, synthetic construct
NSDRGCW

SEQ ID NO: 871 - protein, 7 aa, synthetic construct
TGLTFLE

SEQ ID NO: 872 - protein, 7 aa, synthetic construct
HIQMLLE

SEQ ID NO: 873 - protein, 7 aa, synthetic construct
IMGHMLE

SEQ ID NO: 874 - protein, 7 aa, synthetic construct
DVSGMIE

SEQ ID NO: 875 - protein, 7 aa, synthetic construct
RDAWLVE

SEQ ID NO: 876 - protein, 7 aa, synthetic construct
ESLDGVE

SEQ ID NO: 877 - protein, 7 aa, synthetic construct
LRYQPME

SEQ ID NO: 878 - protein, 7 aa, synthetic construct
CIDSVLE

SEQ ID NO: 879 - protein, 7 aa, synthetic construct
RMGVVME

SEQ ID NO: 880 - protein, 7 aa, synthetic construct
IIQDVME

SEQ ID NO: 881 - protein, 7 aa, synthetic construct
TMAGVME

SEQ ID NO: 882 - protein, 7 aa, synthetic construct
NVDTVLE

SEQ ID NO: 883 - protein, 7 aa, synthetic construct
MSCLVIE

SEQ ID NO: 884 - protein, 7 aa, synthetic construct
RWLKDLM

SEQ ID NO: 885 - protein, 7 aa, synthetic construct
GNGMLGL

SEQ ID NO: 886 - protein, 7 aa, synthetic construct
SDGYVID

SEQ ID NO: 887 - protein, 7 aa, synthetic construct
YRLVFSD

SEQ ID NO: 888 - protein, 7 aa, synthetic construct
ILTNSIE

SEQ ID NO: 889 - protein, 7 aa, synthetic construct
IHRDGIE

SEQ ID NO: 890 - protein, 7 aa, synthetic construct
GVRDVIE

SEQ ID NO: 891 - protein, 7 aa, synthetic construct
IGFVIQE

SEQ ID NO: 892 - protein, 7 aa, synthetic construct
HAGILVE

SEQ ID NO: 893 - protein, 7 aa, synthetic construct
KGNGVIE

SEQ ID NO: 894 - protein, 7 aa, synthetic construct
QRSMLIE

SEQ ID NO: 895 - protein, 7 aa, synthetic construct
GRNGVIE

SEQ ID NO: 896 - protein, 7 aa, synthetic construct
RGPAVVE

SEQ ID NO: 897 - protein, 7 aa, synthetic construct
ITGGVIE

SEQ ID NO: 898 - protein, 7 aa, synthetic construct
TGLVHVE

SEQ ID NO: 899 - protein, 7 aa, synthetic construct
CRLVFCP

SEQ ID NO: 900 - protein, 7 aa, synthetic construct
FRIVFLN

SEQ ID NO: 901 - protein, 7 aa, synthetic construct
HTAIIIE

SEQ ID NO: 902 - protein, 7 aa, synthetic construct
ITGHLLE

SEQ ID NO: 903 - protein, 7 aa, synthetic construct
RNRGALE

SEQ ID NO: 904 - protein, 7 aa, synthetic construct
TAAAMIE

SEQ ID NO: 905 - protein, 7 aa, synthetic construct
VREIGIE

SEQ ID NO: 906 - protein, 7 aa, synthetic construct
ILSQVVE

SEQ ID NO: 907 - protein, 7 aa, synthetic construct
LRGGIIV

SEQ ID NO: 908 - protein, 7 aa, synthetic construct
ISERILE

SEQ ID NO: 909 - protein, 7 aa, synthetic construct
SKTVIVE

SEQ ID NO: 910 - protein, 7 aa, synthetic construct
GSAARLE

SEQ ID NO: 911 - protein, 7 aa, synthetic construct
LKGYIME

SEQ ID NO: 912 - protein, 7 aa, synthetic construct
GITRRIE

SEQ ID NO: 913 - protein, 7 aa, synthetic construct
IAGRVVE

SEQ ID NO: 914 - protein, 7 aa, synthetic construct
LTTFDGT

SEQ ID NO: 915 - protein, 7 aa, synthetic construct
DMRRAQH

SEQ ID NO: 916 - protein, 7 aa, synthetic construct
FVQVPVE

SEQ ID NO: 917 - protein, 7 aa, synthetic construct
YDGTGVE

SEQ ID NO: 918 - protein, 7 aa, synthetic construct
RMFVFQN

SEQ ID NO: 919 - protein, 7 aa, synthetic construct
WRFVFSV

SEQ ID NO: 920 - protein, 7 aa, synthetic construct
YLGQIIE

SEQ ID NO: 921 - protein, 7 aa, synthetic construct
DRIVFND

SEQ ID NO: 922 - protein, 7 aa, synthetic construct
VGVIVLE

SEQ ID NO: 923 - protein, 7 aa, synthetic construct
YVTGAIE

SEQ ID NO: 924 - protein, 7 aa, synthetic construct
NGVGYLE

SEQ ID NO: 925 - protein, 7 aa, synthetic construct
TYVRVIE

SEQ ID NO: 926 - protein, 7 aa, synthetic construct
VGGDMIE

SEQ ID NO: 927 - protein, 7 aa, synthetic construct
NNGHVVE

SEQ ID NO: 928 - protein, 7 aa, synthetic construct
QVGGVMC

SEQ ID NO: 929 - protein, 7 aa, synthetic construct
CTDAWIE

SEQ ID NO: 930 - protein, 7 aa, synthetic construct
INGHRIE

SEQ ID NO: 931 - protein, 7 aa, synthetic construct
FRYVFRN

SEQ ID NO: 932 - protein, 7 aa, synthetic construct
DQSNILE

SEQ ID NO: 933 - protein, 7 aa, synthetic construct
IQDVVVE

SEQ ID NO: 934 - protein, 7 aa, synthetic construct
LMGRIME

SEQ ID NO: 935 - protein, 7 aa, synthetic construct
PITMWLE

SEQ ID NO: 936 - protein, 7 aa, synthetic construct
GESHIVI

SEQ ID NO: 937 - protein, 7 aa, synthetic construct
AGGKVVE

SEQ ID NO: 938 - protein, 7 aa, synthetic construct
NRIVFVE

SEQ ID NO: 939 - protein, 7 aa, synthetic construct
SLEGALD

SEQ ID NO: 940 - protein, 7 aa, synthetic construct
EGERTME

SEQ ID NO: 941 - protein, 7 aa, synthetic construct
LVGVVME

SEQ ID NO: 942 - protein, 7 aa, synthetic construct
SGPAAIE

SEQ ID NO: 943 - protein, 7 aa, synthetic construct
RSDIGVE

SEQ ID NO: 944 - protein, 7 aa, synthetic construct
HIGGFME

SEQ ID NO: 945 - protein, 7 aa, synthetic construct
NGTGVLE

SEQ ID NO: 946 - protein, 7 aa, synthetic construct
SLVGVME

SEQ ID NO: 947 - protein, 7 aa, synthetic construct
RKLCVLE

SEQ ID NO: 948 - protein, 7 aa, synthetic construct
VVPVVVE

SEQ ID NO: 949 - protein, 7 aa, synthetic construct
CCRFALE

SEQ ID NO: 950 - protein, 7 aa, synthetic construct
SDNLRVE

SEQ ID NO: 951 - protein, 7 aa, synthetic construct
LVGFIIE

SEQ ID NO: 952 - protein, 7 aa, synthetic construct
KGKAVIE

SEQ ID NO: 953 - protein, 7 aa, synthetic construct
NVPLVLE

SEQ ID NO: 954 - protein, 7 aa, synthetic construct
RVGTLLE

SEQ ID NO: 955 - protein, 7 aa, synthetic construct
ALRQSIE

SEQ ID NO: 956 - protein, 7 aa, synthetic construct
EVDAFIE

SEQ ID NO: 957 - protein, 7 aa, synthetic construct
HIAIEMV

SEQ ID NO: 958 - protein, 7 aa, synthetic construct
MFGVVLE

SEQ ID NO: 959 - protein, 7 aa, synthetic construct
EIRGMIE

SEQ ID NO: 960 - protein, 7 aa, synthetic construct
SRREYME

SEQ ID NO: 961 - protein, 7 aa, synthetic construct
LMNIALE

SEQ ID NO: 962 - protein, 7 aa, synthetic construct
LIDLSKM

SEQ ID NO: 963 - protein, 7 aa, synthetic construct
PSTSVIE

SEQ ID NO: 964 - protein, 7 aa, synthetic construct
SCQVFLE

SEQ ID NO: 965 - protein, 7 aa, synthetic construct
SKGSAIE

SEQ ID NO: 966 - protein, 7 aa, synthetic construct
VCRLIRF

SEQ ID NO: 967 - protein, 7 aa, synthetic construct
MTGRSLE

SEQ ID NO: 968 - protein, 7 aa, synthetic construct
SRLSVIE

SEQ ID NO: 969 - protein, 7 aa, synthetic construct
YVVLVLE

SEQ ID NO: 970 - protein, 7 aa, synthetic construct
NKQGSVE

SEQ ID NO: 971 - protein, 7 aa, synthetic construct
CESGAIE

SEQ ID NO: 972 - protein, 7 aa, synthetic construct
NINHSVE

SEQ ID NO: 973 - protein, 7 aa, synthetic construct
RRKLVVE

SEQ ID NO: 974 - protein, 7 aa, synthetic construct
EGTKAIE

SEQ ID NO: 975 - protein, 7 aa, synthetic construct
VVGFVIE

SEQ ID NO: 976 - protein, 7 aa, synthetic construct
ESGCIRV

SEQ ID NO: 977 - protein, 7 aa, synthetic construct
HSLRVLE

SEQ ID NO: 978 - protein, 7 aa, synthetic construct
GIGTIME

SEQ ID NO: 979 - protein, 7 aa, synthetic construct
RMVLVVE

SEQ ID NO: 980 - protein, 7 aa, synthetic construct
SNEFMLE

SEQ ID NO: 981 - protein, 7 aa, synthetic construct
DAKWIIE

SEQ ID NO: 982 - protein, 7 aa, synthetic construct
GMEGAME

SEQ ID NO: 983 - protein, 7 aa, synthetic construct
RVIGIVE

SEQ ID NO: 984 - protein, 7 aa, synthetic construct
FRHCFLK

SEQ ID NO: 985 - protein, 7 aa, synthetic construct
IGQVFVE

SEQ ID NO: 986 - protein, 7 aa, synthetic construct
RTLRVIE

SEQ ID NO: 987 - protein, 7 aa, synthetic construct
VSGGGIE

SEQ ID NO: 988 - protein, 7 aa, synthetic construct
EPGVMLM

SEQ ID NO: 989 - protein, 7 aa, synthetic construct
KAGSVPI

SEQ ID NO: 990 - protein, 5 aa, synthetic construct
NGMIV

SEQ ID NO: 991 - protein, 6 aa, synthetic construct
WAIILE

SEQ ID NO: 992 - protein, 7 aa, synthetic construct
DIERVIE

SEQ ID NO: 993 - protein, 7 aa, synthetic construct
QVDGVLE

SEQ ID NO: 994 - protein, 7 aa, synthetic construct
AIRGILE

SEQ ID NO: 995 - protein, 7 aa, synthetic construct
MVAMATR

SEQ ID NO: 996 - protein, 7 aa, synthetic construct
DDDRLLE

SEQ ID NO: 997 - protein, 7 aa, synthetic construct
VRHVPLE

SEQ ID NO: 998 - protein, 7 aa, synthetic construct
VPTSFME

SEQ ID NO: 999 - protein, 7 aa, synthetic construct
RMADFVI

SEQ ID NO: 1000 - protein, 7 aa, synthetic construct
NIDNILE

SEQ ID NO: 1001 - protein, 7 aa, synthetic construct
RCPGVLE

SEQ ID NO: 1002 - protein, 7 aa, synthetic construct
IGGQILE

SEQ ID NO: 1003 - protein, 7 aa, synthetic construct
RILGVLE

SEQ ID NO: 1004 - protein, 7 aa, synthetic construct
VGAFILE

SEQ ID NO: 1005 - protein, 7 aa, synthetic construct
GNVGRVV

SEQ ID NO: 1006 - protein, 7 aa, synthetic construct
MRLVFRN

SEQ ID NO: 1007 - protein, 7 aa, synthetic construct
IGVHSIE

SEQ ID NO: 1008 - protein, 7 aa, synthetic construct
KVASKLE

SEQ ID NO: 1009 - protein, 7 aa, synthetic construct
SMVKALE

SEQ ID NO: 1010 - protein, 7 aa, synthetic construct
GIGTALE

SEQ ID NO: 1011 - protein, 7 aa, synthetic construct
GVRQLIE

SEQ ID NO: 1012 - protein, 7 aa, synthetic construct
AKVLVLE

SEQ ID NO: 1013 - protein, 7 aa, synthetic construct
LASSWLE

SEQ ID NO: 1014 - protein, 7 aa, synthetic construct
MVSEILE

SEQ ID NO: 1015 - protein, 7 aa, synthetic construct
RVIVFRD

SEQ ID NO: 1016 - protein, 7 aa, synthetic construct
DVRTVVE

SEQ ID NO: 1017 - protein, 7 aa, synthetic construct
TDEDAIE

SEQ ID NO: 1018 - protein, 7 aa, synthetic construct
RWMILVE

SEQ ID NO: 1019 - protein, 7 aa, synthetic construct
DQDNVVE

SEQ ID NO: 1020 - protein, 7 aa, synthetic construct
CLGYLIE

SEQ ID NO: 1021 - protein, 7 aa, synthetic construct
VPSRAME

SEQ ID NO: 1022 - protein, 7 aa, synthetic construct
VRIVFIG

SEQ ID NO: 1023 - protein, 7 aa, synthetic construct
RHDDVLE

SEQ ID NO: 1024 - protein, 7 aa, synthetic construct
QRIVCVG

SEQ ID NO: 1025 - protein, 7 aa, synthetic construct
SWNRLME

SEQ ID NO: 1026 - protein, 7 aa, synthetic construct
IRFVFRL

SEQ ID NO: 1027 - protein, 7 aa, synthetic construct
MSFSVIE

SEQ ID NO: 1028 - protein, 7 aa, synthetic construct
GIGVAID

SEQ ID NO: 1029 - protein, 7 aa, synthetic construct
LRGSWME

SEQ ID NO: 1030 - protein, 7 aa, synthetic construct
RMDYILE

SEQ ID NO: 1031 - protein, 7 aa, synthetic construct
VFQDILE

SEQ ID NO: 1032 - protein, 7 aa, synthetic construct
DMMSMVE

SEQ ID NO: 1033 - protein, 7 aa, synthetic construct
RFDRAME

SEQ ID NO: 1034 - protein, 7 aa, synthetic construct
LGGDGLL

SEQ ID NO: 1035 - protein, 7 aa, synthetic construct
LRKFVVE

SEQ ID NO: 1036 - protein, 7 aa, synthetic construct
CTRGMLE

SEQ ID NO: 1037 - protein, 7 aa, synthetic construct
PDITIIE

SEQ ID NO: 1038 - protein, 7 aa, synthetic construct
KTPAILL

SEQ ID NO: 1039 - protein, 7 aa, synthetic construct
ITLLAME

SEQ ID NO: 1040 - protein, 7 aa, synthetic construct
RRGAWME

SEQ ID NO: 1041 - protein, 7 aa, synthetic construct
NAPGQLE

SEQ ID NO: 1042 - protein, 7 aa, synthetic construct
LCGGVME

SEQ ID NO: 1043 - protein, 7 aa, synthetic construct
DVVYVLE

SEQ ID NO: 1044 - protein, 7 aa, synthetic construct
GGTNIIE

SEQ ID NO: 1045 - protein, 7 aa, synthetic construct
CKKKMLE

SEQ ID NO: 1046 - protein, 7 aa, synthetic construct
TDAGMIE

SEQ ID NO: 1047 - protein, 7 aa, synthetic construct
IVARIIE

SEQ ID NO: 1048 - protein, 7 aa, synthetic construct
KLVEVIE

SEQ ID NO: 1049 - protein, 7 aa, synthetic construct
NHRGVLE

SEQ ID NO: 1050 - protein, 7 aa, synthetic construct
KATNRVE

SEQ ID NO: 1051 - protein, 7 aa, synthetic construct
VYKVCGK

SEQ ID NO: 1052 - protein, 7 aa, synthetic construct
AVDGFVE

SEQ ID NO: 1053 - protein, 7 aa, synthetic construct
IEGPAIE

SEQ ID NO: 1054 - protein, 7 aa, synthetic construct
RARLVLE

SEQ ID NO: 1055 - protein, 7 aa, synthetic construct
VNGLVLE

SEQ ID NO: 1056 - protein, 7 aa, synthetic construct
QSHILLE

SEQ ID NO: 1057 - protein, 7 aa, synthetic construct
TVHPLLE

SEQ ID NO: 1058 - protein, 7 aa, synthetic construct
DCRSVIE

SEQ ID NO: 1059 - protein, 7 aa, synthetic construct
KVSAMLE

SEQ ID NO: 1060 - protein, 7 aa, synthetic construct
TGNETIE

SEQ ID NO: 1061 - protein, 7 aa, synthetic construct
RSCDPLE

SEQ ID NO: 1062 - protein, 7 aa, synthetic construct
PAVDVIE

SEQ ID NO: 1063 - protein, 7 aa, synthetic construct
PADGSVE

SEQ ID NO: 1064 - protein, 7 aa, synthetic construct
LIGSVIE

SEQ ID NO: 1065 - protein, 7 aa, synthetic construct
GSVQVLE

SEQ ID NO: 1066 - protein, 7 aa, synthetic construct
RNDAMIE

SEQ ID NO: 1067 - protein, 7 aa, synthetic construct
VTSIVLE

SEQ ID NO: 1068 - protein, 7 aa, synthetic construct
PITSALE

SEQ ID NO: 1069 - protein, 7 aa, synthetic construct
MRIAFRC

SEQ ID NO: 1070 - protein, 7 aa, synthetic construct
HVTNVIE

SEQ ID NO: 1071 - protein, 7 aa, synthetic construct
MGFFVVE

SEQ ID NO: 1072 - protein, 7 aa, synthetic construct
RETGVIE

SEQ ID NO: 1073 - protein, 7 aa, synthetic construct
PAAVLME

SEQ ID NO: 1074 - protein, 7 aa, synthetic construct
ITNGIIE

SEQ ID NO: 1075 - protein, 7 aa, synthetic construct
VPGRVIE

SEQ ID NO: 1076 - protein, 7 aa, synthetic construct
HRVLTSR

SEQ ID NO: 1077 - protein, 7 aa, synthetic construct
AWGMIIE

SEQ ID NO: 1078 - protein, 7 aa, synthetic construct
NGGGGIE

SEQ ID NO: 1079 - protein, 7 aa, synthetic construct
QERFWVD

SEQ ID NO: 1080 - protein, 7 aa, synthetic construct
LWVCPME

SEQ ID NO: 1081 - protein, 7 aa, synthetic construct
KIVHQLG

SEQ ID NO: 1082 - protein, 7 aa, synthetic construct
NTQDAIE

SEQ ID NO: 1083 - protein, 7 aa, synthetic construct
CREGWLE

SEQ ID NO: 1084 - protein, 7 aa, synthetic construct
GRCNGVE

SEQ ID NO: 1085 - protein, 7 aa, synthetic construct
SVQGILE

SEQ ID NO: 1086 - protein, 7 aa, synthetic construct
HVAELVE

SEQ ID NO: 1087 - protein, 7 aa, synthetic construct
RRTVFHD

SEQ ID NO: 1088 - protein, 7 aa, synthetic construct
MMFVFHD

SEQ ID NO: 1089 - protein, 7 aa, synthetic construct
TSGDTLE

SEQ ID NO: 1090 - protein, 7 aa, synthetic construct
DCNKHVL

SEQ ID NO: 1091 - protein, 7 aa, synthetic construct
KGTQIIE

SEQ ID NO: 1092 - protein, 7 aa, synthetic construct
MMNRIVE

SEQ ID NO: 1093 - protein, 7 aa, synthetic construct
MLGNVIE

SEQ ID NO: 1094 - protein, 7 aa, synthetic construct
NVIRPIE

SEQ ID NO: 1095 - protein, 7 aa, synthetic construct
IRDHCIE

SEQ ID NO: 1096 - protein, 7 aa, synthetic construct
MVALPME

SEQ ID NO: 1097 - protein, 7 aa, synthetic construct
HEAVVIE

SEQ ID NO: 1098 - protein, 7 aa, synthetic construct
RSHNILE

SEQ ID NO: 1099 - protein, 7 aa, synthetic construct
RMRDILE

SEQ ID NO: 1100 - protein, 9 aa, synthetic construct
ANEKGLTVD

SEQ ID NO: 1101 - protein, 7 aa, synthetic construct
QRGVIME

SEQ ID NO: 1102 - protein, 7 aa, synthetic construct
DCFVPME

SEQ ID NO: 1103 - protein, 7 aa, synthetic construct
VTKGAME

SEQ ID NO: 1104 - protein, 7 aa, synthetic construct
RTTDILF

SEQ ID NO: 1105 - protein, 7 aa, synthetic construct
DSRQVIE

SEQ ID NO: 1106 - protein, 7 aa, synthetic construct
RLMLWLE

SEQ ID NO: 1107 - protein, 7 aa, synthetic construct
SNSVAVE

SEQ ID NO: 1108 - protein, 7 aa, synthetic construct
KLCRMLE

SEQ ID NO: 1109 - protein, 7 aa, synthetic construct
PLLGTME

SEQ ID NO: 1110 - protein, 7 aa, synthetic construct
NMSIPVR

SEQ ID NO: 1111 - protein, 7 aa, synthetic construct
MTRLVVE

SEQ ID NO: 1112 - protein, 7 aa, synthetic construct
LVADIME

SEQ ID NO: 1113 - protein, 7 aa, synthetic construct
PEEPVME

SEQ ID NO: 1114 - protein, 7 aa, synthetic construct
SRSGQQE

SEQ ID NO: 1115 - protein, 7 aa, synthetic construct
LVGWVLE

SEQ ID NO: 1116 - protein, 7 aa, synthetic construct
GRLRMLE

SEQ ID NO: 1117 - protein, 7 aa, synthetic construct
TDDFIVE

SEQ ID NO: 1118 - protein, 7 aa, synthetic construct
NAKRVIE

SEQ ID NO: 1119 - protein, 7 aa, synthetic construct
SSYDMLE

SEQ ID NO: 1120 - protein, 7 aa, synthetic construct
SGTMVVE

SEQ ID NO: 1121 - protein, 7 aa, synthetic construct
NLGTIVG

SEQ ID NO: 1122 - protein, 7 aa, synthetic construct
KRGDQLG

SEQ ID NO: 1123 - protein, 7 aa, synthetic construct
DVYGVLE

SEQ ID NO: 1124 - protein, 7 aa, synthetic construct
RRIGVVE

SEQ ID NO: 1125 - protein, 7 aa, synthetic construct
MAWPIIS

SEQ ID NO: 1126 - protein, 7 aa, synthetic construct
VLDRIIE

SEQ ID NO: 1127 - protein, 7 aa, synthetic construct
TRNVFKS

SEQ ID NO: 1128 - protein, 7 aa, synthetic construct
VHGTIIE

SEQ ID NO: 1129 - protein, 7 aa, synthetic construct
RLANVVE

SEQ ID NO: 1130 - protein, 7 aa, synthetic construct
KVNFILE

SEQ ID NO: 1131 - protein, 7 aa, synthetic construct
QASSIRT

SEQ ID NO: 1132 - protein, 7 aa, synthetic construct
EMVKSIE

SEQ ID NO: 1133 - protein, 7 aa, synthetic construct
MGARVVE

SEQ ID NO: 1134 - protein, 7 aa, synthetic construct
ARGFVLE

SEQ ID NO: 1135 - protein, 7 aa, synthetic construct
VIAPFLE

SEQ ID NO: 1136 - protein, 7 aa, synthetic construct
HSSGTME

SEQ ID NO: 1137 - protein, 7 aa, synthetic construct
EIVMIIE

SEQ ID NO: 1138 - protein, 7 aa, synthetic construct
PDAAMVE

SEQ ID NO: 1139 - protein, 7 aa, synthetic construct
RAETSLE

SEQ ID NO: 1140 - protein, 7 aa, synthetic construct
CYDVVLE

SEQ ID NO: 1141 - protein, 7 aa, synthetic construct
SMKAMLE

SEQ ID NO: 1142 - protein, 7 aa, synthetic construct
TAKTWMC

SEQ ID NO: 1143 - protein, 7 aa, synthetic construct
DTLNNGS

SEQ ID NO: 1144 - protein, 7 aa, synthetic construct
RCELVLE

SEQ ID NO: 1145 - protein, 7 aa, synthetic construct
IRSKWIR

SEQ ID NO: 1146 - protein, 7 aa, synthetic construct
KMNDKLE

SEQ ID NO: 1147 - protein, 7 aa, synthetic construct
RMVDGVE

SEQ ID NO: 1148 - protein, 7 aa, synthetic construct
DHFAPLE

SEQ ID NO: 1149 - protein, 7 aa, synthetic construct
KGIHIVE

SEQ ID NO: 1150 - protein, 7 aa, synthetic construct
NNCSVVL

SEQ ID NO: 1151 - protein, 7 aa, synthetic construct
AGEMLME

SEQ ID NO: 1152 - protein, 7 aa, synthetic construct
HVEYVLE

SEQ ID NO: 1153 - protein, 7 aa, synthetic construct
KALHMAE

SEQ ID NO: 1154 - protein, 7 aa, synthetic construct
RGTRFME

SEQ ID NO: 1155 - protein, 7 aa, synthetic construct
TVQGILE

SEQ ID NO: 1156 - protein, 7 aa, synthetic construct
MMAARRF

SEQ ID NO: 1157 - protein, 7 aa, synthetic construct
IGQNVIE

SEQ ID NO: 1158 - protein, 7 aa, synthetic construct
NCSNILD

SEQ ID NO: 1159 - protein, 7 aa, synthetic construct
HMSRLIE

SEQ ID NO: 1160 - protein, 7 aa, synthetic construct
VDSGIIE

SEQ ID NO: 1161 - protein, 7 aa, synthetic construct
RFGHVVE

SEQ ID NO: 1162 - protein, 7 aa, synthetic construct
AVRLMME

SEQ ID NO: 1163 - protein, 7 aa, synthetic construct
TAQNVLQ

SEQ ID NO: 1164 - protein, 7 aa, synthetic construct
SGVGVLE

SEQ ID NO: 1165 - protein, 7 aa, synthetic construct
YMEHVLE

SEQ ID NO: 1166 - protein, 7 aa, synthetic construct
ECTGILE

SEQ ID NO: 1167 - protein, 7 aa, synthetic construct
AKVRVVE

SEQ ID NO: 1168 - protein, 7 aa, synthetic construct
ELRGVME

SEQ ID NO: 1169 - protein, 7 aa, synthetic construct
VMNNVLE

SEQ ID NO: 1170 - protein, 7 aa, synthetic construct
GADRCIE

SEQ ID NO: 1171 - protein, 7 aa, synthetic construct
NRAATIE

SEQ ID NO: 1172 - protein, 7 aa, synthetic construct
GVPLLLE

SEQ ID NO: 1173 - protein, 7 aa, synthetic construct
RVVRFLW

SEQ ID NO: 1174 - protein, 7 aa, synthetic construct
EPGRVME

SEQ ID NO: 1175 - protein, 7 aa, synthetic construct
LMDGFLE

SEQ ID NO: 1176 - protein, 7 aa, synthetic construct
SGGDLLE

SEQ ID NO: 1177 - protein, 7 aa, synthetic construct
RPQRMIE

SEQ ID NO: 1178 - protein, 7 aa, synthetic construct
RRGSCME

SEQ ID NO: 1179 - protein, 7 aa, synthetic construct
VIRVFVE

SEQ ID NO: 1180 - protein, 7 aa, synthetic construct
KGDSVLE

SEQ ID NO: 1181 - protein, 7 aa, synthetic construct
HKSRVLE

SEQ ID NO: 1182 - protein, 7 aa, synthetic construct
DLIGIIE

SEQ ID NO: 1183 - protein, 7 aa, synthetic construct
SSKGVME

SEQ ID NO: 1184 - protein, 7 aa, synthetic construct
NVIAVIE

SEQ ID NO: 1185 - protein, 7 aa, synthetic construct
GSDWYLE

SEQ ID NO: 1186 - protein, 7 aa, synthetic construct
CPALVVE

SEQ ID NO: 1187 - protein, 7 aa, synthetic construct
SLVSVIE

SEQ ID NO: 1188 - protein, 7 aa, synthetic construct
MIIPLVE

SEQ ID NO: 1189 - protein, 7 aa, synthetic construct
LGDKDDI

SEQ ID NO: 1190 - protein, 7 aa, synthetic construct
WHGTMLE

SEQ ID NO: 1191 - protein, 7 aa, synthetic construct
GMLVFCH

SEQ ID NO: 1192 - protein, 7 aa, synthetic construct
PTCSPLE

SEQ ID NO: 1193 - protein, 7 aa, synthetic construct
QRIVFVG

SEQ ID NO: 1194 - protein, 7 aa, synthetic construct
CTQIVIE

SEQ ID NO: 1195 - protein, 7 aa, synthetic construct
TRGRGVE

SEQ ID NO: 1196 - protein, 7 aa, synthetic construct
TTPLFTL

SEQ ID NO: 1197 - protein, 7 aa, synthetic construct
DGTLLIE

SEQ ID NO: 1198 - protein, 7 aa, synthetic construct
SIVIVVE

SEQ ID NO: 1199 - protein, 7 aa, synthetic construct
TWPVIME

SEQ ID NO: 1200 - protein, 7 aa, synthetic construct
DCSKRIE

SEQ ID NO: 1201 - protein, 7 aa, synthetic construct
SVRAPLE

SEQ ID NO: 1202 - protein, 7 aa, synthetic construct
NRDCRVE

SEQ ID NO: 1203 - protein, 7 aa, synthetic construct
LRIAFCG

SEQ ID NO: 1204 - protein, 7 aa, synthetic construct
SGARILD

SEQ ID NO: 1205 - protein, 7 aa, synthetic construct
RLRCGIE

SEQ ID NO: 1206 - protein, 7 aa, synthetic construct
HRLVFRN

SEQ ID NO: 1207 - protein, 7 aa, synthetic construct
GIASVLE

SEQ ID NO: 1208 - protein, 7 aa, synthetic construct
RIWNVIE

SEQ ID NO: 1209 - protein, 7 aa, synthetic construct
HVRDMIE

SEQ ID NO: 1210 - protein, 7 aa, synthetic construct
KAGTHME

SEQ ID NO: 1211 - protein, 7 aa, synthetic construct
EVLYVVE

SEQ ID NO: 1212 - protein, 7 aa, synthetic construct
TTGWSLE

SEQ ID NO: 1213 - protein, 7 aa, synthetic construct
PTARVLE

SEQ ID NO: 1214 - protein, 7 aa, synthetic construct
MTRNVLE

SEQ ID NO: 1215 - protein, 7 aa, synthetic construct
NMLMILC

SEQ ID NO: 1216 - protein, 7 aa, synthetic construct
SVGGILE

SEQ ID NO: 1217 - protein, 7 aa, synthetic construct
LSSGLIE

SEQ ID NO: 1218 - protein, 7 aa, synthetic construct
RFNVAIE

SEQ ID NO: 1219 - protein, 7 aa, synthetic construct
IGVMCIE

SEQ ID NO: 1220 - protein, 7 aa, synthetic construct
VSNDGLE

SEQ ID NO: 1221 - protein, 7 aa, synthetic construct
DLLRVIE

SEQ ID NO: 1222 - protein, 7 aa, synthetic construct
IVWEYRM

SEQ ID NO: 1223 - protein, 7 aa, synthetic construct
REVEVVE

SEQ ID NO: 1224 - protein, 7 aa, synthetic construct
SKDVFME

SEQ ID NO: 1225 - protein, 7 aa, synthetic construct
RTGNTIE

SEQ ID NO: 1226 - protein, 7 aa, synthetic construct
DVDGVIE

SEQ ID NO: 1227 - protein, 7 aa, synthetic construct
HRGQIIE

SEQ ID NO: 1228 - protein, 7 aa, synthetic construct
EVVVPVE

SEQ ID NO: 1229 - protein, 7 aa, synthetic construct
PICHIVE

SEQ ID NO: 1230 - protein, 7 aa, synthetic construct
NYAVAIE

SEQ ID NO: 1231 - protein, 7 aa, synthetic construct
REGTGIE

SEQ ID NO: 1232 - protein, 7 aa, synthetic construct
LGPGVIE

SEQ ID NO: 1233 - protein, 7 aa, synthetic construct
LVGFTLE

SEQ ID NO: 1234 - protein, 7 aa, synthetic construct
VGDADFF

SEQ ID NO: 1235 - protein, 7 aa, synthetic construct
REVDVWS

SEQ ID NO: 1236 - protein, 7 aa, synthetic construct
NTGSVIE

SEQ ID NO: 1237 - protein, 7 aa, synthetic construct
WRMVFVA

SEQ ID NO: 1238 - protein, 7 aa, synthetic construct
LDVLGGE

SEQ ID NO: 1239 - protein, 7 aa, synthetic construct
MRGQVLE

SEQ ID NO: 1240 - protein, 7 aa, synthetic construct
LVLTPIE

SEQ ID NO: 1241 - protein, 7 aa, synthetic construct
CFATVLE

SEQ ID NO: 1242 - protein, 7 aa, synthetic construct
DAKMVVE

SEQ ID NO: 1243 - protein, 7 aa, synthetic construct
AMARKME

SEQ ID NO: 1244 - protein, 7 aa, synthetic construct
LTESVME

SEQ ID NO: 1245 - protein, 7 aa, synthetic construct
MRGLGIE

SEQ ID NO: 1246 - protein, 7 aa, synthetic construct
KVSDAVE

SEQ ID NO: 1247 - protein, 7 aa, synthetic construct
SESMIIE

SEQ ID NO: 1248 - protein, 7 aa, synthetic construct
MTQGTVE

SEQ ID NO: 1249 - protein, 7 aa, synthetic construct
WSSDFVE

SEQ ID NO: 1250 - protein, 7 aa, synthetic construct
RNSVVLE

SEQ ID NO: 1251 - protein, 7 aa, synthetic construct
TSHVVME

SEQ ID NO: 1252 - protein, 7 aa, synthetic construct
SRNVVIE

SEQ ID NO: 1253 - protein, 7 aa, synthetic construct
VGGFKLE

SEQ ID NO: 1254 - protein, 7 aa, synthetic construct
CMDRTLE

SEQ ID NO: 1255 - protein, 7 aa, synthetic construct
VFTFVFF

SEQ ID NO: 1256 - protein, 7 aa, synthetic construct
MDGTMLE

SEQ ID NO: 1257 - protein, 7 aa, synthetic construct
QEGTCLE

SEQ ID NO: 1258 - protein, 7 aa, synthetic construct
VTHMMLE

SEQ ID NO: 1259 - protein, 7 aa, synthetic construct
LRAKVIE

SEQ ID NO: 1260 - protein, 7 aa, synthetic construct
GFLRVLE

SEQ ID NO: 1261 - protein, 7 aa, synthetic construct
ITGQVLE

SEQ ID NO: 1262 - protein, 7 aa, synthetic construct
TKQHEMI

SEQ ID NO: 1263 - protein, 7 aa, synthetic construct
TRAFLLE

SEQ ID NO: 1264 - protein, 7 aa, synthetic construct
EFAGIME

SEQ ID NO: 1265 - protein, 7 aa, synthetic construct
QRVVFRK

SEQ ID NO: 1266 - protein, 7 aa, synthetic construct
CFGNMIE

SEQ ID NO: 1267 - protein, 7 aa, synthetic construct
FDGTTVE

SEQ ID NO: 1268 - protein, 7 aa, synthetic construct
DRTVFKM

SEQ ID NO: 1269 - protein, 7 aa, synthetic construct
WRGSVIE

SEQ ID NO: 1270 - protein, 7 aa, synthetic construct
NSMFTLE

SEQ ID NO: 1271 - protein, 7 aa, synthetic construct
ANLFVLE

SEQ ID NO: 1272 - protein, 7 aa, synthetic construct
NQSVLME

SEQ ID NO: 1273 - protein, 7 aa, synthetic construct
LVGSVLE

SEQ ID NO: 1274 - protein, 7 aa, synthetic construct
QQNDVME

SEQ ID NO: 1275 - protein, 7 aa, synthetic construct
NAHIIVE

SEQ ID NO: 1276 - protein, 7 aa, synthetic construct
VVAGAIE

SEQ ID NO: 1277 - protein, 7 aa, synthetic construct
NPYGVVE

SEQ ID NO: 1278 - protein, 7 aa, synthetic construct
NQLSVMV

SEQ ID NO: 1279 - protein, 7 aa, synthetic construct
NQDHTIE

SEQ ID NO: 1280 - protein, 7 aa, synthetic construct
TLVRALC

SEQ ID NO: 1281 - protein, 7 aa, synthetic construct
IYGGIIE

SEQ ID NO: 1282 - protein, 7 aa, synthetic construct
IRLVFKG

SEQ ID NO: 1283 - protein, 7 aa, synthetic construct
DVGPIVE

SEQ ID NO: 1284 - protein, 7 aa, synthetic construct
NRWFIIE

SEQ ID NO: 1285 - protein, 7 aa, synthetic construct
TMDEQVE

SEQ ID NO: 1286 - protein, 7 aa, synthetic construct
TTVGMLE

SEQ ID NO: 1287 - protein, 7 aa, synthetic construct
LRAGGVE

SEQ ID NO: 1288 - protein, 7 aa, synthetic construct
VGCDWLE

SEQ ID NO: 1289 - protein, 7 aa, synthetic construct
EPVTMMW

SEQ ID NO: 1290 - protein, 7 aa, synthetic construct
THKSYLE

SEQ ID NO: 1291 - protein, 7 aa, synthetic construct
VGGHIVE

SEQ ID NO: 1292 - protein, 7 aa, synthetic construct
SSNVCLE

SEQ ID NO: 1293 - protein, 7 aa, synthetic construct
GYHLILF

SEQ ID NO: 1294 - protein, 7 aa, synthetic construct
GCADAIE

SEQ ID NO: 1295 - protein, 7 aa, synthetic construct
DTGLPIE

SEQ ID NO: 1296 - protein, 7 aa, synthetic construct
IEWVGGQ

SEQ ID NO: 1297 - protein, 7 aa, synthetic construct
GLDTVIE

SEQ ID NO: 1298 - protein, 7 aa, synthetic construct
MRGSVVK

SEQ ID NO: 1299 - protein, 7 aa, synthetic construct
HLKHVLE

SEQ ID NO: 1300 - protein, 7 aa, synthetic construct
TAGASVE

SEQ ID NO: 1301 - protein, 7 aa, synthetic construct
SVGRVIE

SEQ ID NO: 1302 - protein, 7 aa, synthetic construct
SYGAPLG

SEQ ID NO: 1303 - protein, 7 aa, synthetic construct
PKASRLE

SEQ ID NO: 1304 - protein, 7 aa, synthetic construct
MGERFML

SEQ ID NO: 1305 - protein, 7 aa, synthetic construct
GTVGIVE

SEQ ID NO: 1306 - protein, 7 aa, synthetic construct
KRATVIE

SEQ ID NO: 1307 - protein, 7 aa, synthetic construct
LVHNVLE

SEQ ID NO: 1308 - protein, 7 aa, synthetic construct
FMQGFTR

SEQ ID NO: 1309 - protein, 7 aa, synthetic construct
NIGDLIE

SEQ ID NO: 1310 - protein, 7 aa, synthetic construct
DSIEVLE

SEQ ID NO: 1311 - protein, 7 aa, synthetic construct
KNMMIMA

SEQ ID NO: 1312 - protein, 7 aa, synthetic construct
MKPMVIE

SEQ ID NO: 1313 - protein, 7 aa, synthetic construct
VNGGIME

SEQ ID NO: 1314 - protein, 7 aa, synthetic construct
SKQYAVE

SEQ ID NO: 1315 - protein, 7 aa, synthetic construct
PRIVFRD

SEQ ID NO: 1316 - protein, 7 aa, synthetic construct
DLVSALE

SEQ ID NO: 1317 - protein, 7 aa, synthetic construct
IASTPLE

SEQ ID NO: 1318 - protein, 7 aa, synthetic construct
PLTDMLA

SEQ ID NO: 1319 - protein, 7 aa, synthetic construct
RLNGLIE

SEQ ID NO: 1320 - protein, 7 aa, synthetic construct
GCVAVIE

SEQ ID NO: 1321 - protein, 7 aa, synthetic construct
LTISVIE

SEQ ID NO: 1322 - protein, 7 aa, synthetic construct
MSQDAVE

SEQ ID NO: 1323 - protein, 7 aa, synthetic construct
NIFPILE

SEQ ID NO: 1324 - protein, 7 aa, synthetic construct
DSKTILE

SEQ ID NO: 1325 - protein, 7 aa, synthetic construct
KSNGVLE

SEQ ID NO: 1326 - protein, 7 aa, synthetic construct
SRGPQIE

SEQ ID NO: 1327 - protein, 7 aa, synthetic construct
NVDGMLE

SEQ ID NO: 1328 - protein, 7 aa, synthetic construct
QLNNMLE

SEQ ID NO: 1329 - protein, 7 aa, synthetic construct
YRQGLVE

SEQ ID NO: 1330 - protein, 7 aa, synthetic construct
NRGHIIE

SEQ ID NO: 1331 - protein, 7 aa, synthetic construct
KVVNVLE

SEQ ID NO: 1332 - protein, 7 aa, synthetic construct
SNYHLLE

SEQ ID NO: 1333 - protein, 7 aa, synthetic construct
VKEKWLN

SEQ ID NO: 1334 - protein, 7 aa, synthetic construct
MMGDLLE

SEQ ID NO: 1335 - protein, 7 aa, synthetic construct
IVEGRTL

SEQ ID NO: 1336 - protein, 7 aa, synthetic construct
MRGLMLE

SEQ ID NO: 1337 - protein, 7 aa, synthetic construct
RVSQLLG

SEQ ID NO: 1338 - protein, 7 aa, synthetic construct
NYAMAME

SEQ ID NO: 1339 - protein, 7 aa, synthetic construct
KGAVMLE

SEQ ID NO: 1340 - protein, 7 aa, synthetic construct
GKQGQVE

SEQ ID NO: 1341 - protein, 7 aa, synthetic construct
TYMESIL

SEQ ID NO: 1342 - protein, 7 aa, synthetic construct
VVGSALE

SEQ ID NO: 1343 - protein, 7 aa, synthetic construct
NRVGRIE

SEQ ID NO: 1344 - protein, 7 aa, synthetic construct
DSAKVLE

SEQ ID NO: 1345 - protein, 7 aa, synthetic construct
IGHEQLE

SEQ ID NO: 1346 - protein, 7 aa, synthetic construct
RLGHLLE

SEQ ID NO: 1347 - protein, 7 aa, synthetic construct
CVDQVIE

SEQ ID NO: 1348 - protein, 7 aa, synthetic construct
MWHRHED

SEQ ID NO: 1349 - protein, 7 aa, synthetic construct
NIDHAIE

SEQ ID NO: 1350 - protein, 7 aa, synthetic construct
IIGKVME

SEQ ID NO: 1351 - protein, 7 aa, synthetic construct
SHMVLIE

SEQ ID NO: 1352 - protein, 7 aa, synthetic construct
LHSVVLE

SEQ ID NO: 1353 - protein, 7 aa, synthetic construct
HLERVLE

SEQ ID NO: 1354 - protein, 7 aa, synthetic construct
GMMLESV

SEQ ID NO: 1355 - protein, 7 aa, synthetic construct
GSGVFIE

SEQ ID NO: 1356 - protein, 7 aa, synthetic construct
LSGRIIE

SEQ ID NO: 1357 - protein, 7 aa, synthetic construct
FVVVFKD

SEQ ID NO: 1358 - protein, 7 aa, synthetic construct
SQDNVLE

SEQ ID NO: 1359 - protein, 7 aa, synthetic construct
TRHVFME

SEQ ID NO: 1360 - protein, 7 aa, synthetic construct
TLTSVIE

SEQ ID NO: 1361 - protein, 7 aa, synthetic construct
NYANSLD

SEQ ID NO: 1362 - protein, 7 aa, synthetic construct
LAHRVIE

SEQ ID NO: 1363 - protein, 7 aa, synthetic construct
VMDSIIE

SEQ ID NO: 1364 - protein, 7 aa, synthetic construct
DIALVME

SEQ ID NO: 1365 - protein, 7 aa, synthetic construct
IAVLGSI

SEQ ID NO: 1366 - protein, 7 aa, synthetic construct
RRAAGLA

SEQ ID NO: 1367 - protein, 7 aa, synthetic construct
LQATVLE

SEQ ID NO: 1368 - protein, 7 aa, synthetic construct
IYHDLME

SEQ ID NO: 1369 - protein, 7 aa, synthetic construct
SLGMALE

SEQ ID NO: 1370 - protein, 7 aa, synthetic construct
DFRGLIE

SEQ ID NO: 1371 - protein, 7 aa, synthetic construct
LSSNVVE

SEQ ID NO: 1372 - protein, 7 aa, synthetic construct
MLDGTME

SEQ ID NO: 1373 - protein, 7 aa, synthetic construct
DVATIIE

SEQ ID NO: 1374 - protein, 7 aa, synthetic construct
GASKLME

SEQ ID NO: 1375 - protein, 7 aa, synthetic construct
KTHTTVE

SEQ ID NO: 1376 - protein, 7 aa, synthetic construct
DVNKLIE

SEQ ID NO: 1377 - protein, 7 aa, synthetic construct
GTADFIE

SEQ ID NO: 1378 - protein, 12 aa, synthetic construct
RVCELLDMGCVG

SEQ ID NO: 1379 - protein, 7 aa, synthetic construct
DCGELVE

SEQ ID NO: 1380 - protein, 7 aa, synthetic construct
RLERAME

SEQ ID NO: 1381 - protein, 7 aa, synthetic construct
RCEMMLC

SEQ ID NO: 1382 - protein, 7 aa, synthetic construct
CQGSSME

SEQ ID NO: 1383 - protein, 7 aa, synthetic construct
IRGLVIE

SEQ ID NO: 1384 - protein, 7 aa, synthetic construct
SHGDLIE

SEQ ID NO: 1385 - protein, 7 aa, synthetic construct
YIGRILE

SEQ ID NO: 1386 - protein, 7 aa, synthetic construct
SVPGKVE

SEQ ID NO: 1387 - protein, 7 aa, synthetic construct
ISGNVLE

SEQ ID NO: 1388 - protein, 7 aa, synthetic construct
KRLVFVG

SEQ ID NO: 1389 - protein, 7 aa, synthetic construct
DRIVFVR

SEQ ID NO: 1390 - protein, 7 aa, synthetic construct
KVTGWLN

SEQ ID NO: 1391 - protein, 7 aa, synthetic construct
IVGIVLE

SEQ ID NO: 1392 - protein, 7 aa, synthetic construct
QVMGLIE

SEQ ID NO: 1393 - protein, 7 aa, synthetic construct
VDSVVVE

SEQ ID NO: 1394 - protein, 7 aa, synthetic construct
SEDRVLE

SEQ ID NO: 1395 - protein, 7 aa, synthetic construct
VRGPTVE

SEQ ID NO: 1396 - protein, 7 aa, synthetic construct
GLTHCIE

SEQ ID NO: 1397 - protein, 7 aa, synthetic construct
RTAAYME

SEQ ID NO: 1398 - protein, 7 aa, synthetic construct
VKGQMVD

SEQ ID NO: 1399 - protein, 7 aa, synthetic construct
RCVQIVE

SEQ ID NO: 1400 - protein, 7 aa, synthetic construct
RKGHQLE

SEQ ID NO: 1401 - protein, 7 aa, synthetic construct
VKGMAME

SEQ ID NO: 1402 - protein, 7 aa, synthetic construct
GIDSVVE

SEQ ID NO: 1403 - protein, 7 aa, synthetic construct
GGMLVIG

SEQ ID NO: 1404 - protein, 7 aa, synthetic construct
CVSTILE

SEQ ID NO: 1405 - protein, 7 aa, synthetic construct
IWGGCIE

SEQ ID NO: 1406 - protein, 7 aa, synthetic construct
PTRSAIE

SEQ ID NO: 1407 - protein, 7 aa, synthetic construct
PLAVIME

SEQ ID NO: 1408 - protein, 7 aa, synthetic construct
LIEAVLE

SEQ ID NO: 1409 - protein, 7 aa, synthetic construct
IVGQVVG

SEQ ID NO: 1410 - protein, 7 aa, synthetic construct
RHEHILE

SEQ ID NO: 1411 - protein, 7 aa, synthetic construct
TIVHIME

SEQ ID NO: 1412 - protein, 7 aa, synthetic construct
IASFVVE

SEQ ID NO: 1413 - protein, 7 aa, synthetic construct
ACGTYIE

SEQ ID NO: 1414 - protein, 7 aa, synthetic construct
GIAYVIE

SEQ ID NO: 1415 - protein, 7 aa, synthetic construct
RVGCMIE

SEQ ID NO: 1416 - protein, 7 aa, synthetic construct
VVRLIIL

SEQ ID NO: 1417 - protein, 7 aa, synthetic construct
TIQFVVE

SEQ ID NO: 1418 - protein, 7 aa, synthetic construct
DLAYWME

SEQ ID NO: 1419 - protein, 7 aa, synthetic construct
VDRQVLE

SEQ ID NO: 1420 - protein, 7 aa, synthetic construct
RVTGAME

SEQ ID NO: 1421 - protein, 7 aa, synthetic construct
TIGRSVE

SEQ ID NO: 1422 - protein, 7 aa, synthetic construct
RIMNMVE

SEQ ID NO: 1423 - protein, 7 aa, synthetic construct
ERSCMLE

SEQ ID NO: 1424 - protein, 7 aa, synthetic construct
MGRKVLE

SEQ ID NO: 1425 - protein, 7 aa, synthetic construct
VMDSVVE

SEQ ID NO: 1426 - protein, 7 aa, synthetic construct
ALAGMLE

SEQ ID NO: 1427 - protein, 7 aa, synthetic construct
MRDFIIE

SEQ ID NO: 1428 - protein, 7 aa, synthetic construct
ALNGVME

SEQ ID NO: 1429 - protein, 7 aa, synthetic construct
MRSGLLE

SEQ ID NO: 1430 - protein, 7 aa, synthetic construct
IRGVMLE

SEQ ID NO: 1431 - protein, 7 aa, synthetic construct
QVGGILE

SEQ ID NO: 1432 - protein, 7 aa, synthetic construct
SPGVMVE

SEQ ID NO: 1433 - protein, 7 aa, synthetic construct
TVLRVIE

SEQ ID NO: 1434 - protein, 7 aa, synthetic construct
MVKDVME

SEQ ID NO: 1435 - protein, 7 aa, synthetic construct
RYVSILE

SEQ ID NO: 1436 - protein, 7 aa, synthetic construct
HEHLMVD

SEQ ID NO: 1437 - protein, 7 aa, synthetic construct
MDKHVLE

SEQ ID NO: 1438 - protein, 7 aa, synthetic construct
DLAQVLE

SEQ ID NO: 1439 - protein, 7 aa, synthetic construct
RGGTWFE

SEQ ID NO: 1440 - protein, 7 aa, synthetic construct
QGGHLVE

SEQ ID NO: 1441 - protein, 7 aa, synthetic construct
HGAVLVE

SEQ ID NO: 1442 - protein, 7 aa, synthetic construct
RWKNELE

SEQ ID NO: 1443 - protein, 7 aa, synthetic construct
RRTVFLR

SEQ ID NO: 1444 - protein, 7 aa, synthetic construct
RKCKMIE

SEQ ID NO: 1445 - protein, 7 aa, synthetic construct
ACRMQLE

SEQ ID NO: 1446 - protein, 7 aa, synthetic construct
GAPQLIE

SEQ ID NO: 1447 - protein, 7 aa, synthetic construct
YRIVFQL

SEQ ID NO: 1448 - protein, 7 aa, synthetic construct
EERLSGE

SEQ ID NO: 1449 - protein, 7 aa, synthetic construct
NADRCLE

SEQ ID NO: 1450 - protein, 7 aa, synthetic construct
GTNALIE

SEQ ID NO: 1451 - protein, 7 aa, synthetic construct
HDRFVME

SEQ ID NO: 1452 - protein, 7 aa, synthetic construct
IVWLVME

SEQ ID NO: 1453 - protein, 7 aa, synthetic construct
CCDNGME

SEQ ID NO: 1454 - protein, 7 aa, synthetic construct
VRHRVIE

SEQ ID NO: 1455 - protein, 7 aa, synthetic construct
GIHSWLE

SEQ ID NO: 1456 - protein, 7 aa, synthetic construct
IVGVMLE

SEQ ID NO: 1457 - protein, 7 aa, synthetic construct
KGLMTIE

SEQ ID NO: 1458 - protein, 7 aa, synthetic construct
INGKVLE

SEQ ID NO: 1459 - protein, 7 aa, synthetic construct
VSDRTVE

SEQ ID NO: 1460 - protein, 7 aa, synthetic construct
PTFYVVE

SEQ ID NO: 1461 - protein, 7 aa, synthetic construct
PLKRYVY

SEQ ID NO: 1462 - protein, 7 aa, synthetic construct
STGTGLE

SEQ ID NO: 1463 - protein, 7 aa, synthetic construct
DCMRVME

SEQ ID NO: 1464 - protein, 7 aa, synthetic construct
MERRVLE

SEQ ID NO: 1465 - protein, 7 aa, synthetic construct
RRLMLVE

SEQ ID NO: 1466 - protein, 7 aa, synthetic construct
MVGQILE

SEQ ID NO: 1467 - protein, 7 aa, synthetic construct
TKHLILE

SEQ ID NO: 1468 - protein, 7 aa, synthetic construct
YRIVFQT

SEQ ID NO: 1469 - protein, 7 aa, synthetic construct
VLGRIVE

SEQ ID NO: 1470 - protein, 7 aa, synthetic construct
MMGEILA

SEQ ID NO: 1471 - protein, 7 aa, synthetic construct
GFNNPIE

SEQ ID NO: 1472 - protein, 7 aa, synthetic construct
EVGTLIE

SEQ ID NO: 1473 - protein, 7 aa, synthetic construct
SVTAVIE

SEQ ID NO: 1474 - protein, 7 aa, synthetic construct
PSGVVIE

SEQ ID NO: 1475 - protein, 7 aa, synthetic construct
MALVFRR

SEQ ID NO: 1476 - protein, 7 aa, synthetic construct
RGDRILE

SEQ ID NO: 1477 - protein, 7 aa, synthetic construct
KLNMALE

SEQ ID NO: 1478 - protein, 7 aa, synthetic construct
RDGRCIE

SEQ ID NO: 1479 - protein, 7 aa, synthetic construct
NKRDIME

SEQ ID NO: 1480 - protein, 4 aa, synthetic construct
NMVE

SEQ ID NO: 1481 - protein, 7 aa, synthetic construct
MNQAPME

SEQ ID NO: 1482 - protein, 7 aa, synthetic construct
TIGLVIE

SEQ ID NO: 1483 - protein, 7 aa, synthetic construct
TNGMVVE

SEQ ID NO: 1484 - protein, 7 aa, synthetic construct
KKAGMIE

SEQ ID NO: 1485 - protein, 7 aa, synthetic construct
HITQYLE

SEQ ID NO: 1486 - protein, 7 aa, synthetic construct
RLVGVVE

SEQ ID NO: 1487 - protein, 7 aa, synthetic construct
PVVTVVE

SEQ ID NO: 1488 - protein, 7 aa, synthetic construct
CHEMVIE

SEQ ID NO: 1489 - protein, 7 aa, synthetic construct
MRGWALE

SEQ ID NO: 1490 - protein, 7 aa, synthetic construct
IRIGFAV

SEQ ID NO: 1491 - protein, 7 aa, synthetic construct
NMRFALE

SEQ ID NO: 1492 - protein, 7 aa, synthetic construct
ETNGIVE

SEQ ID NO: 1493 - protein, 7 aa, synthetic construct
IGNVVME

SEQ ID NO: 1494 - protein, 7 aa, synthetic construct
SAAHTVE

SEQ ID NO: 1495 - protein, 7 aa, synthetic construct
VLRSVLE

SEQ ID NO: 1496 - protein, 7 aa, synthetic construct
GTQDTIE

SEQ ID NO: 1497 - protein, 7 aa, synthetic construct
LVNTYIE

SEQ ID NO: 1498 - protein, 7 aa, synthetic construct
RRVGMIE

SEQ ID NO: 1499 - protein, 7 aa, synthetic construct
TAALVME

SEQ ID NO: 1500 - protein, 7 aa, synthetic construct
VMAAAME

SEQ ID NO: 1501 - protein, 7 aa, synthetic construct
MVNTAFE

SEQ ID NO: 1502 - protein, 7 aa, synthetic construct
DGSGIIE

SEQ ID NO: 1503 - protein, 7 aa, synthetic construct
SEGLLVE

SEQ ID NO: 1504 - protein, 7 aa, synthetic construct
CGPNSLE

SEQ ID NO: 1505 - protein, 7 aa, synthetic construct
VDKGFIE

SEQ ID NO: 1506 - protein, 7 aa, synthetic construct
KNCVMME

SEQ ID NO: 1507 - protein, 7 aa, synthetic construct
MPGISLS

SEQ ID NO: 1508 - protein, 7 aa, synthetic construct
TIVGAME

SEQ ID NO: 1509 - protein, 7 aa, synthetic construct
DLWHQTV

SEQ ID NO: 1510 - protein, 7 aa, synthetic construct
RRLVFVT

SEQ ID NO: 1511 - protein, 7 aa, synthetic construct
IVWAVLE

SEQ ID NO: 1512 - protein, 7 aa, synthetic construct
IVRNCFE

SEQ ID NO: 1513 - protein, 7 aa, synthetic construct
TPASSIE

SEQ ID NO: 1514 - protein, 7 aa, synthetic construct
LPVWVVE

SEQ ID NO: 1515 - protein, 7 aa, synthetic construct
IGERVLE

SEQ ID NO: 1516 - protein, 7 aa, synthetic construct
DSEGVFW

SEQ ID NO: 1517 - protein, 7 aa, synthetic construct
VLKGTLE

SEQ ID NO: 1518 - protein, 7 aa, synthetic construct
NVALGME

SEQ ID NO: 1519 - protein, 7 aa, synthetic construct
LLGRGIE

SEQ ID NO: 1520 - protein, 7 aa, synthetic construct
LSHETIE

SEQ ID NO: 1521 - protein, 7 aa, synthetic construct
DVRRLLE

SEQ ID NO: 1522 - protein, 7 aa, synthetic construct
EGNSVLE

SEQ ID NO: 1523 - protein, 7 aa, synthetic construct
MSDGILE

SEQ ID NO: 1524 - protein, 7 aa, synthetic construct
KLVGMLE

SEQ ID NO: 1525 - protein, 7 aa, synthetic construct
SGRNCIE

SEQ ID NO: 1526 - protein, 7 aa, synthetic construct
GAGTVLE

SEQ ID NO: 1527 - protein, 7 aa, synthetic construct
GKGSMIM

SEQ ID NO: 1528 - protein, 7 aa, synthetic construct
FKGFVIE

SEQ ID NO: 1529 - protein, 7 aa, synthetic construct
ATFLPLE

SEQ ID NO: 1530 - protein, 7 aa, synthetic construct
VCGIKIE

SEQ ID NO: 1531 - protein, 7 aa, synthetic construct
PSDLNIE

SEQ ID NO: 1532 - protein, 7 aa, synthetic construct
IQDRVLE

SEQ ID NO: 1533 - protein, 7 aa, synthetic construct
MSHRALE

SEQ ID NO: 1534 - protein, 7 aa, synthetic construct
IVGEVLE

SEQ ID NO: 1535 - protein, 7 aa, synthetic construct
IMSSVIE

SEQ ID NO: 1536 - protein, 7 aa, synthetic construct
VCGKVME

SEQ ID NO: 1537 - protein, 7 aa, synthetic construct
EMRGMLE

SEQ ID NO: 1538 - protein, 7 aa, synthetic construct
FLSGVMM

SEQ ID NO: 1539 - protein, 7 aa, synthetic construct
RTFVFNR

SEQ ID NO: 1540 - protein, 7 aa, synthetic construct
ITGYVIE

SEQ ID NO: 1541 - protein, 7 aa, synthetic construct
DECAVIE

SEQ ID NO: 1542 - protein, 7 aa, synthetic construct
SENVFIE

SEQ ID NO: 1543 - protein, 7 aa, synthetic construct
SIVSLLW

SEQ ID NO: 1544 - protein, 7 aa, synthetic construct
GADSCLE

SEQ ID NO: 1545 - protein, 7 aa, synthetic construct
GEDVALE

SEQ ID NO: 1546 - protein, 7 aa, synthetic construct
GRLVFIA

SEQ ID NO: 1547 - protein, 7 aa, synthetic construct
VSKVLME

SEQ ID NO: 1548 - protein, 7 aa, synthetic construct
PNKAVIE

SEQ ID NO: 1549 - protein, 7 aa, synthetic construct
VNRLTVE

SEQ ID NO: 1550 - protein, 7 aa, synthetic construct
DTPTVVE

SEQ ID NO: 1551 - protein, 7 aa, synthetic construct
NNVGIIE

SEQ ID NO: 1552 - protein, 7 aa, synthetic construct
NMLDAFF

SEQ ID NO: 1553 - protein, 7 aa, synthetic construct
DWGKCVE

SEQ ID NO: 1554 - protein, 7 aa, synthetic construct
QGYHVLE

SEQ ID NO: 1555 - protein, 7 aa, synthetic construct
NMEPIVE

SEQ ID NO: 1556 - protein, 7 aa, synthetic construct
IRTVFIG

SEQ ID NO: 1557 - protein, 7 aa, synthetic construct
NRHIRIE

SEQ ID NO: 1558 - protein, 6 aa, synthetic construct
MVGFIE

SEQ ID NO: 1559 - protein, 7 aa, synthetic construct
ILAVSLE

SEQ ID NO: 1560 - protein, 7 aa, synthetic construct
NTHQVLE

SEQ ID NO: 1561 - protein, 7 aa, synthetic construct
VTGWLIE

SEQ ID NO: 1562 - protein, 7 aa, synthetic construct
YVGILVE

SEQ ID NO: 1563 - protein, 7 aa, synthetic construct
GIGWVLE

SEQ ID NO: 1564 - protein, 7 aa, synthetic construct
GQDVAIE

SEQ ID NO: 1565 - protein, 7 aa, synthetic construct
RMGLSIE

SEQ ID NO: 1566 - protein, 7 aa, synthetic construct
IMGQNVE

SEQ ID NO: 1567 - protein, 7 aa, synthetic construct
IQDNCIE

SEQ ID NO: 1568 - protein, 7 aa, synthetic construct
VVGRAME

SEQ ID NO: 1569 - protein, 7 aa, synthetic construct
KANAVLA

SEQ ID NO: 1570 - protein, 7 aa, synthetic construct
MGKVMLE

SEQ ID NO: 1571 - protein, 7 aa, synthetic construct
LIGVVME

SEQ ID NO: 1572 - protein, 7 aa, synthetic construct
WCWNMID

SEQ ID NO: 1573 - protein, 7 aa, synthetic construct
GDRHVIE

SEQ ID NO: 1574 - protein, 7 aa, synthetic construct
FRRGLVA

SEQ ID NO: 1575 - protein, 7 aa, synthetic construct
GHGLVIE

SEQ ID NO: 1576 - protein, 7 aa, synthetic construct
HMGMVIE

SEQ ID NO: 1577 - protein, 7 aa, synthetic construct
RQECQVI

SEQ ID NO: 1578 - protein, 7 aa, synthetic construct
VTSLRVL

SEQ ID NO: 1579 - protein, 7 aa, synthetic construct
QSDGVIE

SEQ ID NO: 1580 - protein, 7 aa, synthetic construct
DAVTVLE

SEQ ID NO: 1581 - protein, 7 aa, synthetic construct
IAGMVIE

SEQ ID NO: 1582 - protein, 7 aa, synthetic construct
SRGSALE

SEQ ID NO: 1583 - protein, 7 aa, synthetic construct
MLSHALE

SEQ ID NO: 1584 - protein, 7 aa, synthetic construct
CVKGVVE

SEQ ID NO: 1585 - protein, 7 aa, synthetic construct
DVKTFLE

SEQ ID NO: 1586 - protein, 7 aa, synthetic construct
MRIVFQP

SEQ ID NO: 1587 - protein, 7 aa, synthetic construct
LDAVVIE

SEQ ID NO: 1588 - protein, 7 aa, synthetic construct
LGGIVLE

SEQ ID NO: 1589 - protein, 7 aa, synthetic construct
VRLVFQS

SEQ ID NO: 1590 - protein, 7 aa, synthetic construct
VEGVGLE

SEQ ID NO: 1591 - protein, 7 aa, synthetic construct
SITCMID

SEQ ID NO: 1592 - protein, 7 aa, synthetic construct
NIGRVLE

SEQ ID NO: 1593 - protein, 7 aa, synthetic construct
DLAVVVE

SEQ ID NO: 1594 - protein, 7 aa, synthetic construct
DVACVVE

SEQ ID NO: 1595 - protein, 7 aa, synthetic construct
VIGNVVE

SEQ ID NO: 1596 - protein, 7 aa, synthetic construct
GRGDVIE

SEQ ID NO: 1597 - protein, 7 aa, synthetic construct
IKAGVLE

SEQ ID NO: 1598 - protein, 7 aa, synthetic construct
NNHKVLE

SEQ ID NO: 1599 - protein, 7 aa, synthetic construct
NRPLVIE

SEQ ID NO: 1600 - protein, 7 aa, synthetic construct
FVPSPLE

SEQ ID NO: 1601 - protein, 7 aa, synthetic construct
TDGTRID

SEQ ID NO: 1602 - protein, 7 aa, synthetic construct
VNVLTFR

SEQ ID NO: 1603 - protein, 7 aa, synthetic construct
SVANTIE

SEQ ID NO: 1604 - protein, 7 aa, synthetic construct
KVEWILE

SEQ ID NO: 1605 - protein, 5 aa, synthetic construct
DGVLE

SEQ ID NO: 1606 - protein, 7 aa, synthetic construct
RMARVVE

SEQ ID NO: 1607 - protein, 7 aa, synthetic construct
TTSGSIE

SEQ ID NO: 1608 - protein, 7 aa, synthetic construct
TPNTLLE

SEQ ID NO: 1609 - protein, 7 aa, synthetic construct
EDAMTIE

SEQ ID NO: 1610 - protein, 7 aa, synthetic construct
QDCGWVE

SEQ ID NO: 1611 - protein, 7 aa, synthetic construct
SRYHVIE

SEQ ID NO: 1612 - protein, 7 aa, synthetic construct
AGTHAIE

SEQ ID NO: 1613 - protein, 7 aa, synthetic construct
IFGETVE

SEQ ID NO: 1614 - protein, 7 aa, synthetic construct
NVGVILE

SEQ ID NO: 1615 - protein, 7 aa, synthetic construct
NMASAIE

SEQ ID NO: 1616 - protein, 7 aa, synthetic construct
QIEKPIE

SEQ ID NO: 1617 - protein, 7 aa, synthetic construct
SKGNDID

SEQ ID NO: 1618 - protein, 7 aa, synthetic construct
NRGSIIE

SEQ ID NO: 1619 - protein, 7 aa, synthetic construct
SLSNILE

SEQ ID NO: 1620 - protein, 7 aa, synthetic construct
REAPILE

SEQ ID NO: 1621 - protein, 7 aa, synthetic construct
RTAMVYF

SEQ ID NO: 1622 - protein, 7 aa, synthetic construct
NISGKVE

SEQ ID NO: 1623 - protein, 7 aa, synthetic construct
VYSSILE

SEQ ID NO: 1624 - protein, 7 aa, synthetic construct
IMGNVLE

SEQ ID NO: 1625 - protein, 7 aa, synthetic construct
VDGLVLE

SEQ ID NO: 1626 - protein, 7 aa, synthetic construct
VNGVPME

SEQ ID NO: 1627 - protein, 7 aa, synthetic construct
VERDFLE

SEQ ID NO: 1628 - protein, 7 aa, synthetic construct
DGHGMVE

SEQ ID NO: 1629 - protein, 7 aa, synthetic construct
NIRSNLE

SEQ ID NO: 1630 - protein, 7 aa, synthetic construct
GRIVFTD

SEQ ID NO: 1631 - protein, 7 aa, synthetic construct
NSGLLLA

SEQ ID NO: 1632 - protein, 7 aa, synthetic construct
SRGSRIE

SEQ ID NO: 1633 - protein, 7 aa, synthetic construct
VQGGMLS

SEQ ID NO: 1634 - protein, 7 aa, synthetic construct
MIGLVLE

SEQ ID NO: 1635 - protein, 7 aa, synthetic construct
IGLDVIE

SEQ ID NO: 1636 - protein, 7 aa, synthetic construct
QKHRVLE

SEQ ID NO: 1637 - protein, 7 aa, synthetic construct
MVRNVLD

SEQ ID NO: 1638 - protein, 7 aa, synthetic construct
THSRVIE

SEQ ID NO: 1639 - protein, 7 aa, synthetic construct
SDGTRVE

SEQ ID NO: 1640 - protein, 7 aa, synthetic construct
MRSTVLE

SEQ ID NO: 1641 - protein, 7 aa, synthetic construct
LMGDVIE

SEQ ID NO: 1642 - protein, 7 aa, synthetic construct
LLQRIVE

SEQ ID NO: 1643 - protein, 7 aa, synthetic construct
KGNYLLE

SEQ ID NO: 1644 - protein, 7 aa, synthetic construct
MVGNFIE

SEQ ID NO: 1645 - protein, 7 aa, synthetic construct
SVGQFVE

SEQ ID NO: 1646 - protein, 7 aa, synthetic construct
IRGAAME

SEQ ID NO: 1647 - protein, 7 aa, synthetic construct
LRGIVME

SEQ ID NO: 1648 - protein, 7 aa, synthetic construct
MGDDFIE

SEQ ID NO: 1649 - protein, 7 aa, synthetic construct
KHGVGLE

SEQ ID NO: 1650 - protein, 7 aa, synthetic construct
VRGLVME

SEQ ID NO: 1651 - protein, 7 aa, synthetic construct
TRLVFRV

SEQ ID NO: 1652 - protein, 4 aa, synthetic construct
KFVR

SEQ ID NO: 1653 - protein, 7 aa, synthetic construct
RRVRILE

SEQ ID NO: 1654 - protein, 7 aa, synthetic construct
VAGIPIE

SEQ ID NO: 1655 - protein, 7 aa, synthetic construct
ILGDVME

SEQ ID NO: 1656 - protein, 7 aa, synthetic construct
GVDSVLE

SEQ ID NO: 1657 - protein, 7 aa, synthetic construct
SCGAVIE

SEQ ID NO: 1658 - protein, 7 aa, synthetic construct
FTQALIE

SEQ ID NO: 1659 - protein, 7 aa, synthetic construct
RVSVVLE

SEQ ID NO: 1660 - protein, 7 aa, synthetic construct
GVKTCLE

SEQ ID NO: 1661 - protein, 7 aa, synthetic construct
CNQTIIE

SEQ ID NO: 1662 - protein, 7 aa, synthetic construct
HDGTDLE

SEQ ID NO: 1663 - protein, 7 aa, synthetic construct
VDQIVLE

SEQ ID NO: 1664 - protein, 7 aa, synthetic construct
FMEVDGQ

SEQ ID NO: 1665 - protein, 7 aa, synthetic construct
GRIVFLP

SEQ ID NO: 1666 - protein, 7 aa, synthetic construct
EIALVIE

SEQ ID NO: 1667 - protein, 7 aa, synthetic construct
VDGMIVD

SEQ ID NO: 1668 - protein, 7 aa, synthetic construct
ICEFILE

SEQ ID NO: 1669 - protein, 7 aa, synthetic construct
QSRVVLE

SEQ ID NO: 1670 - protein, 7 aa, synthetic construct
RDHMTIE

SEQ ID NO: 1671 - protein, 7 aa, synthetic construct
CRIVFNV

SEQ ID NO: 1672 - protein, 7 aa, synthetic construct
HGVKPLE

SEQ ID NO: 1673 - protein, 7 aa, synthetic construct
VKGSVME

SEQ ID NO: 1674 - protein, 7 aa, synthetic construct
VDGRVME

SEQ ID NO: 1675 - protein, 7 aa, synthetic construct
PIAVIME

SEQ ID NO: 1676 - protein, 7 aa, synthetic construct
VTPYIIE

SEQ ID NO: 1677 - protein, 7 aa, synthetic construct
VTGIVVE

SEQ ID NO: 1678 - protein, 7 aa, synthetic construct
GRIVFVG

SEQ ID NO: 1679 - protein, 7 aa, synthetic construct
NAGEIVE

SEQ ID NO: 1680 - protein, 7 aa, synthetic construct
TIEMMVR

SEQ ID NO: 1681 - protein, 7 aa, synthetic construct
HIHQLLE

SEQ ID NO: 1682 - protein, 7 aa, synthetic construct
MPHVIIE

SEQ ID NO: 1683 - protein, 7 aa, synthetic construct
DQQHCIE

SEQ ID NO: 1684 - protein, 7 aa, synthetic construct
IADTVVE

SEQ ID NO: 1685 - protein, 7 aa, synthetic construct
NADRFVE

SEQ ID NO: 1686 - protein, 7 aa, synthetic construct
RKDDMIE

SEQ ID NO: 1687 - protein, 7 aa, synthetic construct
HRSNVLE

SEQ ID NO: 1688 - protein, 7 aa, synthetic construct
LLDMVME

SEQ ID NO: 1689 - protein, 7 aa, synthetic construct
SLGGGLE

SEQ ID NO: 1690 - protein, 7 aa, synthetic construct
NAEGFVE

SEQ ID NO: 1691 - protein, 7 aa, synthetic construct
NIGAVVE

SEQ ID NO: 1692 - protein, 7 aa, synthetic construct
YVERVVE

SEQ ID NO: 1693 - protein, 7 aa, synthetic construct
HPGVLLE

SEQ ID NO: 1694 - protein, 7 aa, synthetic construct
VNDRVLG

SEQ ID NO: 1695 - protein, 7 aa, synthetic construct
QLEIVVE

SEQ ID NO: 1696 - protein, 7 aa, synthetic construct
KNALVLE

SEQ ID NO: 1697 - protein, 4 aa, synthetic construct
GGIE

SEQ ID NO: 1698 - protein, 7 aa, synthetic construct
DDAYEVH

SEQ ID NO: 1699 - protein, 7 aa, synthetic construct
RGVRKIE

SEQ ID NO: 1700 - protein, 7 aa, synthetic construct
QKGIMLE

SEQ ID NO: 1701 - protein, 7 aa, synthetic construct
RVSDGVE

SEQ ID NO: 1702 - protein, 7 aa, synthetic construct
TSGPVLE

SEQ ID NO: 1703 - protein, 7 aa, synthetic construct
WYGELWF

SEQ ID NO: 1704 - protein, 7 aa, synthetic construct
FMHVFLG

SEQ ID NO: 1705 - protein, 7 aa, synthetic construct
MFGSFIE

SEQ ID NO: 1706 - protein, 7 aa, synthetic construct
AKGRVVE

SEQ ID NO: 1707 - protein, 7 aa, synthetic construct
PMHVTIE

SEQ ID NO: 1708 - protein, 7 aa, synthetic construct
SMVHVVE

SEQ ID NO: 1709 - protein, 7 aa, synthetic construct
VLGVTLE

SEQ ID NO: 1710 - protein, 7 aa, synthetic construct
EVFRVIE

SEQ ID NO: 1711 - protein, 7 aa, synthetic construct
RNGSWID

SEQ ID NO: 1712 - protein, 7 aa, synthetic construct
VGAVEGQ

SEQ ID NO: 1713 - protein, 7 aa, synthetic construct
HTGILME

SEQ ID NO: 1714 - protein, 7 aa, synthetic construct
PTVNPIE

SEQ ID NO: 1715 - protein, 7 aa, synthetic construct
RTHMLME

SEQ ID NO: 1716 - protein, 7 aa, synthetic construct
KQHEVLE

SEQ ID NO: 1717 - protein, 7 aa, synthetic construct
CDAGIVE

SEQ ID NO: 1718 - protein, 7 aa, synthetic construct
AVAPPIE

SEQ ID NO: 1719 - protein, 7 aa, synthetic construct
CRNDTLE

SEQ ID NO: 1720 - protein, 7 aa, synthetic construct
VAGIGIE

SEQ ID NO: 1721 - protein, 7 aa, synthetic construct
CLGQRME

SEQ ID NO: 1722 - protein, 7 aa, synthetic construct
SVGLVME

SEQ ID NO: 1723 - protein, 7 aa, synthetic construct
EALVVVE

SEQ ID NO: 1724 - protein, 7 aa, synthetic construct
KCVDVWS

SEQ ID NO: 1725 - protein, 7 aa, synthetic construct
VMFVFRD

SEQ ID NO: 1726 - protein, 7 aa, synthetic construct
IVKGVIG

SEQ ID NO: 1727 - protein, 7 aa, synthetic construct
GIPHVVE

SEQ ID NO: 1728 - protein, 7 aa, synthetic construct
NMVLGDV

SEQ ID NO: 1729 - protein, 7 aa, synthetic construct
QVNMAVE

SEQ ID NO: 1730 - protein, 7 aa, synthetic construct
IRFVFLI

SEQ ID NO: 1731 - protein, 7 aa, synthetic construct
MYGLILE

SEQ ID NO: 1732 - protein, 7 aa, synthetic construct
LFGNVVE

SEQ ID NO: 1733 - protein, 7 aa, synthetic construct
ELSRDLF

SEQ ID NO: 1734 - protein, 7 aa, synthetic construct
SRLRTIE

SEQ ID NO: 1735 - protein, 7 aa, synthetic construct
ARRFVLE

SEQ ID NO: 1736 - protein, 7 aa, synthetic construct
PDMGFIE

SEQ ID NO: 1737 - protein, 7 aa, synthetic construct
IYSGGIE

SEQ ID NO: 1738 - protein, 7 aa, synthetic construct
RINRLME

SEQ ID NO: 1739 - protein, 7 aa, synthetic construct
HSAGVVE

SEQ ID NO: 1740 - protein, 7 aa, synthetic construct
VLPWVLG

SEQ ID NO: 1741 - protein, 7 aa, synthetic construct
IRGNILE

SEQ ID NO: 1742 - protein, 7 aa, synthetic construct
EGVVVVE

SEQ ID NO: 1743 - protein, 7 aa, synthetic construct
LDYNVLE

SEQ ID NO: 1744 - protein, 7 aa, synthetic construct
VKAHVLE

SEQ ID NO: 1745 - protein, 7 aa, synthetic construct
RRIVFRE

SEQ ID NO: 1746 - protein, 7 aa, synthetic construct
SVDVGIE

SEQ ID NO: 1747 - protein, 7 aa, synthetic construct
RIMDRMF

SEQ ID NO: 1748 - protein, 7 aa, synthetic construct
MPHEAIE

SEQ ID NO: 1749 - protein, 7 aa, synthetic construct
VNAVLLE

SEQ ID NO: 1750 - protein, 7 aa, synthetic construct
TLGVTIE

SEQ ID NO: 1751 - protein, 7 aa, synthetic construct
RRVVWLE

SEQ ID NO: 1752 - protein, 7 aa, synthetic construct
KDRYLVE

SEQ ID NO: 1753 - protein, 7 aa, synthetic construct
RLDRMLE

SEQ ID NO: 1754 - protein, 7 aa, synthetic construct
LSSHCLE

SEQ ID NO: 1755 - protein, 7 aa, synthetic construct
HADQCVE

SEQ ID NO: 1756 - protein, 7 aa, synthetic construct
RLLRLIE

SEQ ID NO: 1757 - protein, 7 aa, synthetic construct
STPGFME

SEQ ID NO: 1758 - protein, 7 aa, synthetic construct
KTQGLIE

SEQ ID NO: 1759 - protein, 7 aa, synthetic construct
EKELVGY

SEQ ID NO: 1760 - protein, 6 aa, synthetic construct
TDGAID

SEQ ID NO: 1761 - protein, 7 aa, synthetic construct
MGTRALE

SEQ ID NO: 1762 - protein, 7 aa, synthetic construct
DVQGLVE

SEQ ID NO: 1763 - protein, 7 aa, synthetic construct
PVGAMVE

SEQ ID NO: 1764 - protein, 7 aa, synthetic construct
RRFNILE

SEQ ID NO: 1765 - protein, 7 aa, synthetic construct
DSKLAIE

SEQ ID NO: 1766 - protein, 7 aa, synthetic construct
RRDDGIE

SEQ ID NO: 1767 - protein, 7 aa, synthetic construct
CRAIILA

SEQ ID NO: 1768 - protein, 7 aa, synthetic construct
GTSRTIF

SEQ ID NO: 1769 - protein, 7 aa, synthetic construct
GNPSYIE

SEQ ID NO: 1770 - protein, 7 aa, synthetic construct
IGRKGLE

SEQ ID NO: 1771 - protein, 7 aa, synthetic construct
GLVVFKR

SEQ ID NO: 1772 - protein, 7 aa, synthetic construct
LRIVFIR

SEQ ID NO: 1773 - protein, 7 aa, synthetic construct
VIAVCGQ

SEQ ID NO: 1774 - protein, 7 aa, synthetic construct
RGDGMIE

SEQ ID NO: 1775 - protein, 7 aa, synthetic construct
AGFNVLE

SEQ ID NO: 1776 - protein, 7 aa, synthetic construct
FRGVLWH

SEQ ID NO: 1777 - protein, 7 aa, synthetic construct
SLRSLIE

SEQ ID NO: 1778 - protein, 7 aa, synthetic construct
TEHQVVE

SEQ ID NO: 1779 - protein, 7 aa, synthetic construct
THLLIWF

SEQ ID NO: 1780 - protein, 7 aa, synthetic construct
MPGSVLE

SEQ ID NO: 1781 - protein, 7 aa, synthetic construct
TLKYVFE

SEQ ID NO: 1782 - protein, 7 aa, synthetic construct
IGKGFGV

SEQ ID NO: 1783 - protein, 7 aa, synthetic construct
ANDRALE

SEQ ID NO: 1784 - protein, 7 aa, synthetic construct
NDMGIIE

SEQ ID NO: 1785 - protein, 7 aa, synthetic construct
GRMSILE

SEQ ID NO: 1786 - protein, 7 aa, synthetic construct
RVLHVVE

SEQ ID NO: 1787 - protein, 7 aa, synthetic construct
MRIVFLG

SEQ ID NO: 1788 - protein, 7 aa, synthetic construct
QRIVFVN

SEQ ID NO: 1789 - protein, 7 aa, synthetic construct
KSAKCLE

SEQ ID NO: 1790 - protein, 7 aa, synthetic construct
QSPGILE

SEQ ID NO: 1791 - protein, 7 aa, synthetic construct
YNGHAIE

SEQ ID NO: 1792 - protein, 7 aa, synthetic construct
SNNRCVE

SEQ ID NO: 1793 - protein, 7 aa, synthetic construct
DRVDMLE

SEQ ID NO: 1794 - protein, 7 aa, synthetic construct
SPNNMME

SEQ ID NO: 1795 - protein, 7 aa, synthetic construct
RLHAWIE

SEQ ID NO: 1796 - protein, 5 aa, synthetic construct
RSWLE

SEQ ID NO: 1797 - protein, 7 aa, synthetic construct
VGYCLVE

SEQ ID NO: 1798 - protein, 7 aa, synthetic construct
DGSCIIE

SEQ ID NO: 1799 - protein, 7 aa, synthetic construct
VTDTVSH

SEQ ID NO: 1800 - protein, 7 aa, synthetic construct
LLCSALE

SEQ ID NO: 1801 - protein, 7 aa, synthetic construct
WLMGIGS

SEQ ID NO: 1802 - protein, 7 aa, synthetic construct
PAEELME

SEQ ID NO: 1803 - protein, 7 aa, synthetic construct
ILSRGME

SEQ ID NO: 1804 - protein, 7 aa, synthetic construct
KVHQAIE

SEQ ID NO: 1805 - protein, 7 aa, synthetic construct
LGSSRTV

SEQ ID NO: 1806 - protein, 6 aa, synthetic construct
SCGRNQ

SEQ ID NO: 1807 - protein, 7 aa, synthetic construct
YSHDVIE

SEQ ID NO: 1808 - protein, 7 aa, synthetic construct
EIHLFLD

SEQ ID NO: 1809 - protein, 7 aa, synthetic construct
LGGTVIE

SEQ ID NO: 1810 - protein, 7 aa, synthetic construct
EYSARVW

SEQ ID NO: 1811 - protein, 7 aa, synthetic construct
RGLGIIE

SEQ ID NO: 1812 - protein, 5 aa, synthetic construct
VAMME

SEQ ID NO: 1813 - protein, 7 aa, synthetic construct
RHSLIIE

SEQ ID NO: 1814 - protein, 7 aa, synthetic construct
MKGLVIE

SEQ ID NO: 1815 - protein, 7 aa, synthetic construct
IEVRPLE

SEQ ID NO: 1816 - protein, 7 aa, synthetic construct
EAANMLE

SEQ ID NO: 1817 - protein, 7 aa, synthetic construct
ALNNLLE

SEQ ID NO: 1818 - protein, 7 aa, synthetic construct
RDSGFVE

SEQ ID NO: 1819 - protein, 7 aa, synthetic construct
RTAKAIE

SEQ ID NO: 1820 - protein, 7 aa, synthetic construct
LQGRLME

SEQ ID NO: 1821 - protein, 7 aa, synthetic construct
GMGELLE

SEQ ID NO: 1822 - protein, 7 aa, synthetic construct
MDGSVVE

SEQ ID NO: 1823 - protein, 7 aa, synthetic construct
FWGIVLE

SEQ ID NO: 1824 - protein, 7 aa, synthetic construct
WTIPALE

SEQ ID NO: 1825 - protein, 7 aa, synthetic construct
LVYNVLE

SEQ ID NO: 1826 - protein, 7 aa, synthetic construct
YNDHVIE

SEQ ID NO: 1827 - protein, 7 aa, synthetic construct
SDHRTLE

SEQ ID NO: 1828 - protein, 7 aa, synthetic construct
PLITLME

SEQ ID NO: 1829 - protein, 7 aa, synthetic construct
KMHLAIE

SEQ ID NO: 1830 - protein, 7 aa, synthetic construct
KMATALE

SEQ ID NO: 1831 - protein, 7 aa, synthetic construct
IREKVIE

SEQ ID NO: 1832 - protein, 7 aa, synthetic construct
KQSEFLE

SEQ ID NO: 1833 - protein, 6 aa, synthetic construct
PNEWIC

SEQ ID NO: 1834 - protein, 7 aa, synthetic construct
LVRIPVE

SEQ ID NO: 1835 - protein, 7 aa, synthetic construct
GRTVFKE

SEQ ID NO: 1836 - protein, 7 aa, synthetic construct
SVARIME

SEQ ID NO: 1837 - protein, 7 aa, synthetic construct
NIRLLVE

SEQ ID NO: 1838 - protein, 7 aa, synthetic construct
ARKEILE

SEQ ID NO: 1839 - protein, 7 aa, synthetic construct
VLGSVME

SEQ ID NO: 1840 - protein, 7 aa, synthetic construct
VCKHFGT

SEQ ID NO: 1841 - protein, 7 aa, synthetic construct
SGRSIIE

SEQ ID NO: 1842 - protein, 7 aa, synthetic construct
LVGMQGR

SEQ ID NO: 1843 - protein, 7 aa, synthetic construct
LLHTVIE

SEQ ID NO: 1844 - protein, 7 aa, synthetic construct
VQRLKLE

SEQ ID NO: 1845 - protein, 7 aa, synthetic construct
PTSRAVE

SEQ ID NO: 1846 - protein, 7 aa, synthetic construct
CMGTDGE

SEQ ID NO: 1847 - protein, 7 aa, synthetic construct
HVDAIIE

SEQ ID NO: 1848 - protein, 7 aa, synthetic construct
SLKYAVE

SEQ ID NO: 1849 - protein, 7 aa, synthetic construct
HTQLVME

SEQ ID NO: 1850 - protein, 7 aa, synthetic construct
GIHMMLE

SEQ ID NO: 1851 - protein, 7 aa, synthetic construct
NGYTTLE

SEQ ID NO: 1852 - protein, 7 aa, synthetic construct
GMRDAIE

SEQ ID NO: 1853 - protein, 7 aa, synthetic construct
SGDNFLE

SEQ ID NO: 1854 - protein, 7 aa, synthetic construct
DAQDVLE

SEQ ID NO: 1855 - protein, 6 aa, synthetic construct
ESTPVE

SEQ ID NO: 1856 - protein, 7 aa, synthetic construct
RGLSILE

SEQ ID NO: 1857 - protein, 7 aa, synthetic construct
FLSGRKV

SEQ ID NO: 1858 - protein, 7 aa, synthetic construct
NRCNVME

SEQ ID NO: 1859 - protein, 7 aa, synthetic construct
MAHRVLE

SEQ ID NO: 1860 - protein, 7 aa, synthetic construct
PLVSLKP

SEQ ID NO: 1861 - protein, 7 aa, synthetic construct
CHGTMLE

SEQ ID NO: 1862 - protein, 7 aa, synthetic construct
QGVRIIE

SEQ ID NO: 1863 - protein, 7 aa, synthetic construct
DRRGLYE

SEQ ID NO: 1864 - protein, 7 aa, synthetic construct
MHADGIE

SEQ ID NO: 1865 - protein, 7 aa, synthetic construct
IMERVIE

SEQ ID NO: 1866 - protein, 7 aa, synthetic construct
NIRSVME

SEQ ID NO: 1867 - protein, 7 aa, synthetic construct
WLEQLLE

SEQ ID NO: 1868 - protein, 7 aa, synthetic construct
CPFTGMV

SEQ ID NO: 1869 - protein, 7 aa, synthetic construct
HRGKFIE

SEQ ID NO: 1870 - protein, 7 aa, synthetic construct
SKSVILE

SEQ ID NO: 1871 - protein, 7 aa, synthetic construct
LMGVIME

SEQ ID NO: 1872 - protein, 7 aa, synthetic construct
GRLVFMS

SEQ ID NO: 1873 - protein, 7 aa, synthetic construct
TGAAQME

SEQ ID NO: 1874 - protein, 7 aa, synthetic construct
WVPRVIE

SEQ ID NO: 1875 - protein, 7 aa, synthetic construct
LVAEGVE

SEQ ID NO: 1876 - protein, 6 aa, synthetic construct
EGTIID

SEQ ID NO: 1877 - protein, 7 aa, synthetic construct
MVVEIVC

SEQ ID NO: 1878 - protein, 7 aa, synthetic construct
RDRGILE

SEQ ID NO: 1879 - protein, 7 aa, synthetic construct
SLFGGIE

SEQ ID NO: 1880 - protein, 7 aa, synthetic construct
EVKWFME

SEQ ID NO: 1881 - protein, 7 aa, synthetic construct
RLGMVVE

SEQ ID NO: 1882 - protein, 7 aa, synthetic construct
LVQWSSV

SEQ ID NO: 1883 - protein, 7 aa, synthetic construct
ARTVFVM

SEQ ID NO: 1884 - protein, 7 aa, synthetic construct
VSAVVIE

SEQ ID NO: 1885 - protein, 7 aa, synthetic construct
SNGWLIE

SEQ ID NO: 1886 - protein, 7 aa, synthetic construct
NYGTVLE

SEQ ID NO: 1887 - protein, 7 aa, synthetic construct
PGAIWLE

SEQ ID NO: 1888 - protein, 7 aa, synthetic construct
KFRATIE

SEQ ID NO: 1889 - protein, 7 aa, synthetic construct
NRVTYLE

SEQ ID NO: 1890 - protein, 7 aa, synthetic construct
SVGYVLE

SEQ ID NO: 1891 - protein, 7 aa, synthetic construct
RFGGLIE

SEQ ID NO: 1892 - protein, 7 aa, synthetic construct
TRGVVLE

SEQ ID NO: 1893 - protein, 7 aa, synthetic construct
HLGICIE

SEQ ID NO: 1894 - protein, 7 aa, synthetic construct
RWPDKLE

SEQ ID NO: 1895 - protein, 7 aa, synthetic construct
PVMRVME

SEQ ID NO: 1896 - protein, 7 aa, synthetic construct
LAFVVVE

SEQ ID NO: 1897 - protein, 7 aa, synthetic construct
GLINVLE

SEQ ID NO: 1898 - protein, 7 aa, synthetic construct
LPGFTME

SEQ ID NO: 1899 - protein, 7 aa, synthetic construct
FRIVFVM

SEQ ID NO: 1900 - protein, 7 aa, synthetic construct
VVAIVLE

SEQ ID NO: 1901 - protein, 7 aa, synthetic construct
QRSMALE

SEQ ID NO: 1902 - protein, 7 aa, synthetic construct
MMTRVLE

SEQ ID NO: 1903 - protein, 7 aa, synthetic construct
RRSEVME

SEQ ID NO: 1904 - protein, 7 aa, synthetic construct
RAEIMME

SEQ ID NO: 1905 - protein, 7 aa, synthetic construct
TRTVFVT

SEQ ID NO: 1906 - protein, 7 aa, synthetic construct
HLRDCME

SEQ ID NO: 1907 - protein, 7 aa, synthetic construct
NLGHALE

SEQ ID NO: 1908 - protein, 7 aa, synthetic construct
DMCDVLE

SEQ ID NO: 1909 - protein, 7 aa, synthetic construct
QARSLLE

SEQ ID NO: 1910 - protein, 7 aa, synthetic construct
MIRTWWF

SEQ ID NO: 1911 - protein, 7 aa, synthetic construct
ICAVVME

SEQ ID NO: 1912 - protein, 7 aa, synthetic construct
GKGYRIE

SEQ ID NO: 1913 - protein, 7 aa, synthetic construct
TAHDSIE

SEQ ID NO: 1914 - protein, 7 aa, synthetic construct
GTVCFLE

SEQ ID NO: 1915 - protein, 7 aa, synthetic construct
RWGVMME

SEQ ID NO: 1916 - protein, 7 aa, synthetic construct
DARSGIE

SEQ ID NO: 1917 - protein, 7 aa, synthetic construct
RLWDPLE

SEQ ID NO: 1918 - protein, 7 aa, synthetic construct
MERCCLE

SEQ ID NO: 1919 - protein, 7 aa, synthetic construct
RLATVME

SEQ ID NO: 1920 - protein, 7 aa, synthetic construct
LVRFIVE

SEQ ID NO: 1921 - protein, 7 aa, synthetic construct
RIRGMLE

SEQ ID NO: 1922 - protein, 7 aa, synthetic construct
VYTDWVE

SEQ ID NO: 1923 - protein, 7 aa, synthetic construct
SRKGIMS

SEQ ID NO: 1924 - protein, 7 aa, synthetic construct
HVVDFLE

SEQ ID NO: 1925 - protein, 7 aa, synthetic construct
LSNEIVE

SEQ ID NO: 1926 - protein, 7 aa, synthetic construct
LFVQSGV

SEQ ID NO: 1927 - protein, 7 aa, synthetic construct
ISALMIE

SEQ ID NO: 1928 - protein, 7 aa, synthetic construct
PMSRVVE

SEQ ID NO: 1929 - protein, 7 aa, synthetic construct
EVGQVIE

SEQ ID NO: 1930 - protein, 7 aa, synthetic construct
ERLGRIE

SEQ ID NO: 1931 - protein, 7 aa, synthetic construct
GRIVFQS

SEQ ID NO: 1932 - protein, 7 aa, synthetic construct
RRIVFKM

SEQ ID NO: 1933 - protein, 7 aa, synthetic construct
SCDTLIA

SEQ ID NO: 1934 - protein, 7 aa, synthetic construct
VPAVLLE

SEQ ID NO: 1935 - protein, 7 aa, synthetic construct
LVNMVME

SEQ ID NO: 1936 - protein, 7 aa, synthetic construct
WRGVLME

SEQ ID NO: 1937 - protein, 7 aa, synthetic construct
SSHLILE

SEQ ID NO: 1938 - protein, 7 aa, synthetic construct
LPKNVVE

SEQ ID NO: 1939 - protein, 7 aa, synthetic construct
MCHDVVE

SEQ ID NO: 1940 - protein, 7 aa, synthetic construct
RCDGLIE

SEQ ID NO: 1941 - protein, 7 aa, synthetic construct
GVMKMIE

SEQ ID NO: 1942 - protein, 7 aa, synthetic construct
SRNSMIE

SEQ ID NO: 1943 - protein, 7 aa, synthetic construct
SGESALC

SEQ ID NO: 1944 - protein, 7 aa, synthetic construct
CSRDGFE

SEQ ID NO: 1945 - protein, 7 aa, synthetic construct
VIENTLE

SEQ ID NO: 1946 - protein, 7 aa, synthetic construct
SEEGVIE

SEQ ID NO: 1947 - protein, 7 aa, synthetic construct
QYDEVVE

SEQ ID NO: 1948 - protein, 7 aa, synthetic construct
VRGVNIE

SEQ ID NO: 1949 - protein, 7 aa, synthetic construct
ASSNIME

SEQ ID NO: 1950 - protein, 7 aa, synthetic construct
LVDTIIE

SEQ ID NO: 1951 - protein, 7 aa, synthetic construct
LIPMCLE

SEQ ID NO: 1952 - protein, 7 aa, synthetic construct
RITYVLQ

SEQ ID NO: 1953 - protein, 7 aa, synthetic construct
MTGRIME

SEQ ID NO: 1954 - protein, 7 aa, synthetic construct
REGVRVE

SEQ ID NO: 1955 - protein, 7 aa, synthetic construct
GVGTMLE

SEQ ID NO: 1956 - protein, 7 aa, synthetic construct
RINGVIE

SEQ ID NO: 1957 - protein, 7 aa, synthetic construct
GFHVGRF

SEQ ID NO: 1958 - protein, 7 aa, synthetic construct
DRRGCIE

SEQ ID NO: 1959 - protein, 7 aa, synthetic construct
INGKAIE

SEQ ID NO: 1960 - protein, 7 aa, synthetic construct
NSAKVIE

SEQ ID NO: 1961 - protein, 7 aa, synthetic construct
LNAEVME

SEQ ID NO: 1962 - protein, 7 aa, synthetic construct
LEAMIME

SEQ ID NO: 1963 - protein, 7 aa, synthetic construct
GMAQALE

SEQ ID NO: 1964 - protein, 7 aa, synthetic construct
VGRVENV

SEQ ID NO: 1965 - protein, 7 aa, synthetic construct
DYAHFLE

SEQ ID NO: 1966 - protein, 7 aa, synthetic construct
GQAHILE

SEQ ID NO: 1967 - protein, 7 aa, synthetic construct
HNDLVVE

SEQ ID NO: 1968 - protein, 7 aa, synthetic construct
PRHVLIE

SEQ ID NO: 1969 - protein, 7 aa, synthetic construct
KVENSVE

SEQ ID NO: 1970 - protein, 7 aa, synthetic construct
SVRFVLE

SEQ ID NO: 1971 - protein, 7 aa, synthetic construct
NCRLVIE

SEQ ID NO: 1972 - protein, 7 aa, synthetic construct
PGLRFVI

SEQ ID NO: 1973 - protein, 7 aa, synthetic construct
TRSASVE

SEQ ID NO: 1974 - protein, 7 aa, synthetic construct
MGGSWVE

SEQ ID NO: 1975 - protein, 7 aa, synthetic construct
DMVSLME

SEQ ID NO: 1976 - protein, 7 aa, synthetic construct
LGPDILE

SEQ ID NO: 1977 - protein, 7 aa, synthetic construct
RVNNTIE

SEQ ID NO: 1978 - protein, 7 aa, synthetic construct
KYVNFLE

SEQ ID NO: 1979 - protein, 7 aa, synthetic construct
IHGVGLE

SEQ ID NO: 1980 - protein, 7 aa, synthetic construct
ITGRKME

SEQ ID NO: 1981 - protein, 7 aa, synthetic construct
LTAWVIE

SEQ ID NO: 1982 - protein, 7 aa, synthetic construct
MHCVFQN

SEQ ID NO: 1983 - protein, 7 aa, synthetic construct
VMGMQLE

SEQ ID NO: 1984 - protein, 7 aa, synthetic construct
ISGVKVS

SEQ ID NO: 1985 - protein, 7 aa, synthetic construct
HNPKVME

SEQ ID NO: 1986 - protein, 7 aa, synthetic construct
DNDGLLE

SEQ ID NO: 1987 - protein, 7 aa, synthetic construct
VGSGGLE

SEQ ID NO: 1988 - protein, 7 aa, synthetic construct
IPDTVLE

SEQ ID NO: 1989 - protein, 7 aa, synthetic construct
RRMTCIE

SEQ ID NO: 1990 - protein, 7 aa, synthetic construct
STKVPIE

SEQ ID NO: 1991 - protein, 7 aa, synthetic construct
DKGCRVE

SEQ ID NO: 1992 - protein, 7 aa, synthetic construct
SRAGMIE

SEQ ID NO: 1993 - protein, 7 aa, synthetic construct
LARGIME

SEQ ID NO: 1994 - protein, 7 aa, synthetic construct
RMDRTVE

SEQ ID NO: 1995 - protein, 7 aa, synthetic construct
LVRGLFT

SEQ ID NO: 1996 - protein, 7 aa, synthetic construct
SLLGVME

SEQ ID NO: 1997 - protein, 7 aa, synthetic construct
QIAFAVE

SEQ ID NO: 1998 - protein, 7 aa, synthetic construct
GSRHMME

SEQ ID NO: 1999 - protein, 7 aa, synthetic construct
NPSNDKP

SEQ ID NO: 2000 - protein, 7 aa, synthetic construct
ILKFVLE

SEQ ID NO: 2001 - protein, 7 aa, synthetic construct
KGSYVLE

SEQ ID NO: 2002 - protein, 7 aa, synthetic construct
YAYVILE

SEQ ID NO: 2003 - protein, 7 aa, synthetic construct
DRGSLVE

SEQ ID NO: 2004 - protein, 7 aa, synthetic construct
GTLYVVE

SEQ ID NO: 2005 - protein, 7 aa, synthetic construct
RGNLLVE

SEQ ID NO: 2006 - protein, 7 aa, synthetic construct
NVIKFME

SEQ ID NO: 2007 - protein, 7 aa, synthetic construct
IMGVVFM

SEQ ID NO: 2008 - protein, 7 aa, synthetic construct
TDLIILE

SEQ ID NO: 2009 - protein, 7 aa, synthetic construct
RRAGVLE

SEQ ID NO: 2010 - protein, 7 aa, synthetic construct
RLVLVIE

SEQ ID NO: 2011 - protein, 7 aa, synthetic construct
KGRGVIE

SEQ ID NO: 2012 - protein, 7 aa, synthetic construct
TGMYRGP

SEQ ID NO: 2013 - protein, 7 aa, synthetic construct
IAGLIIE

SEQ ID NO: 2014 - protein, 7 aa, synthetic construct
EKSVMLE

SEQ ID NO: 2015 - protein, 7 aa, synthetic construct
GGMKVVE

SEQ ID NO: 2016 - protein, 7 aa, synthetic construct
KTRSIVE

SEQ ID NO: 2017 - protein, 7 aa, synthetic construct
TNEGMLE

SEQ ID NO: 2018 - protein, 7 aa, synthetic construct
LGGQKVE

SEQ ID NO: 2019 - protein, 7 aa, synthetic construct
IVARTIE

SEQ ID NO: 2020 - protein, 7 aa, synthetic construct
QARGIVE

SEQ ID NO: 2021 - protein, 7 aa, synthetic construct
GMIVFKD

SEQ ID NO: 2022 - protein, 7 aa, synthetic construct
VRKGVLE

SEQ ID NO: 2023 - protein, 7 aa, synthetic construct
SPAPFIE

SEQ ID NO: 2024 - protein, 7 aa, synthetic construct
GMGVVLE

SEQ ID NO: 2025 - protein, 7 aa, synthetic construct
HEDVNGR

SEQ ID NO: 2026 - protein, 7 aa, synthetic construct
QSHYKVE

SEQ ID NO: 2027 - protein, 7 aa, synthetic construct
VRAVFLD

SEQ ID NO: 2028 - protein, 7 aa, synthetic construct
VNNGIIE

SEQ ID NO: 2029 - protein, 7 aa, synthetic construct
RQGVIVD

SEQ ID NO: 2030 - protein, 7 aa, synthetic construct
NMMEFME

SEQ ID NO: 2031 - protein, 7 aa, synthetic construct
VMGWIID

SEQ ID NO: 2032 - protein, 7 aa, synthetic construct
STHTVME

SEQ ID NO: 2033 - protein, 7 aa, synthetic construct
SMRFIME

SEQ ID NO: 2034 - protein, 7 aa, synthetic construct
SRLMLIS

SEQ ID NO: 2035 - protein, 7 aa, synthetic construct
VSATKME

SEQ ID NO: 2036 - protein, 7 aa, synthetic construct
MDDLGLE

SEQ ID NO: 2037 - protein, 7 aa, synthetic construct
FNGQELE

SEQ ID NO: 2038 - protein, 7 aa, synthetic construct
ISGYMLE

SEQ ID NO: 2039 - protein, 7 aa, synthetic construct
DVSSVIE

SEQ ID NO: 2040 - protein, 7 aa, synthetic construct
MDDCGIE

SEQ ID NO: 2041 - protein, 7 aa, synthetic construct
LAGTVIE

SEQ ID NO: 2042 - protein, 7 aa, synthetic construct
HVGMWME

SEQ ID NO: 2043 - protein, 7 aa, synthetic construct
VEHGVVE

SEQ ID NO: 2044 - protein, 7 aa, synthetic construct
RVHQVIE

SEQ ID NO: 2045 - protein, 7 aa, synthetic construct
NRHGWLE

SEQ ID NO: 2046 - protein, 7 aa, synthetic construct
VVPVIME

SEQ ID NO: 2047 - protein, 7 aa, synthetic construct
HVDMILE

SEQ ID NO: 2048 - protein, 7 aa, synthetic construct
VIDNVIE

SEQ ID NO: 2049 - protein, 7 aa, synthetic construct
VRRDPME

SEQ ID NO: 2050 - protein, 7 aa, synthetic construct
KVIAVIE

SEQ ID NO: 2051 - protein, 7 aa, synthetic construct
PACGYVE

SEQ ID NO: 2052 - protein, 7 aa, synthetic construct
LGAHYIE

SEQ ID NO: 2053 - protein, 7 aa, synthetic construct
YILGYLE

SEQ ID NO: 2054 - protein, 7 aa, synthetic construct
IGIVGDN

SEQ ID NO: 2055 - protein, 7 aa, synthetic construct
ELSGVME

SEQ ID NO: 2056 - protein, 7 aa, synthetic construct
GVVRFLE

SEQ ID NO: 2057 - protein, 7 aa, synthetic construct
TIDNILE

SEQ ID NO: 2058 - protein, 7 aa, synthetic construct
YINFVIE

SEQ ID NO: 2059 - protein, 7 aa, synthetic construct
ARGVILE

SEQ ID NO: 2060 - protein, 7 aa, synthetic construct
SGQGMIE

SEQ ID NO: 2061 - protein, 7 aa, synthetic construct
MTSMVLE

SEQ ID NO: 2062 - protein, 7 aa, synthetic construct
MLAAVIE

SEQ ID NO: 2063 - protein, 7 aa, synthetic construct
RHDGVLE

SEQ ID NO: 2064 - protein, 7 aa, synthetic construct
PRTGVIE

SEQ ID NO: 2065 - protein, 7 aa, synthetic construct
AGNCFME

SEQ ID NO: 2066 - protein, 7 aa, synthetic construct
DNVLVLE

SEQ ID NO: 2067 - protein, 7 aa, synthetic construct
LIRGIIE

SEQ ID NO: 2068 - protein, 7 aa, synthetic construct
SLGALLE

SEQ ID NO: 2069 - protein, 7 aa, synthetic construct
DSIYWIE

SEQ ID NO: 2070 - protein, 7 aa, synthetic construct
RRLRIIE

SEQ ID NO: 2071 - protein, 7 aa, synthetic construct
RSRKCVE

SEQ ID NO: 2072 - protein, 7 aa, synthetic construct
RAGSLIE

SEQ ID NO: 2073 - protein, 7 aa, synthetic construct
SETGMIE

SEQ ID NO: 2074 - protein, 7 aa, synthetic construct
WPVMSIE

SEQ ID NO: 2075 - protein, 7 aa, synthetic construct
KSRTCIE

SEQ ID NO: 2076 - protein, 7 aa, synthetic construct
QIKIPIE

SEQ ID NO: 2077 - protein, 7 aa, synthetic construct
QMESAIE

SEQ ID NO: 2078 - protein, 7 aa, synthetic construct
HNGAVLE

SEQ ID NO: 2079 - protein, 7 aa, synthetic construct
NVDSVMY

SEQ ID NO: 2080 - protein, 7 aa, synthetic construct
GVSAAIE

SEQ ID NO: 2081 - protein, 7 aa, synthetic construct
PRGLIME

SEQ ID NO: 2082 - protein, 7 aa, synthetic construct
VEISEVI

SEQ ID NO: 2083 - protein, 7 aa, synthetic construct
SGDRTIE

SEQ ID NO: 2084 - protein, 7 aa, synthetic construct
VYRGVVE

SEQ ID NO: 2085 - protein, 7 aa, synthetic construct
VDYGRIV

SEQ ID NO: 2086 - protein, 7 aa, synthetic construct
VIGRPLD

SEQ ID NO: 2087 - protein, 7 aa, synthetic construct
MEDCALE

SEQ ID NO: 2088 - protein, 7 aa, synthetic construct
NRERAHF

SEQ ID NO: 2089 - protein, 7 aa, synthetic construct
MGPDVIE

SEQ ID NO: 2090 - protein, 7 aa, synthetic construct
WHTLHGQ

SEQ ID NO: 2091 - protein, 7 aa, synthetic construct
LSKETLE

SEQ ID NO: 2092 - protein, 7 aa, synthetic construct
GTLGILE

SEQ ID NO: 2093 - protein, 7 aa, synthetic construct
LKMTLIE

SEQ ID NO: 2094 - protein, 4 aa, synthetic construct
QVLE

SEQ ID NO: 2095 - protein, 7 aa, synthetic construct
LSGTVLE

SEQ ID NO: 2096 - protein, 7 aa, synthetic construct
QRSLWLE

SEQ ID NO: 2097 - protein, 7 aa, synthetic construct
KRQDVLE

SEQ ID NO: 2098 - protein, 7 aa, synthetic construct
HRMGFKS

SEQ ID NO: 2099 - protein, 7 aa, synthetic construct
LRRLPIE

SEQ ID NO: 2100 - protein, 7 aa, synthetic construct
HTEHAIE

SEQ ID NO: 2101 - protein, 7 aa, synthetic construct
DRAHLMS

SEQ ID NO: 2102 - protein, 7 aa, synthetic construct
MMAHVVE

SEQ ID NO: 2103 - protein, 7 aa, synthetic construct
LAGAGIE

SEQ ID NO: 2104 - protein, 7 aa, synthetic construct
TVDGVIE

SEQ ID NO: 2105 - protein, 6 aa, synthetic construct
TAIGQD

SEQ ID NO: 2106 - protein, 7 aa, synthetic construct
DDQGLVE

SEQ ID NO: 2107 - protein, 7 aa, synthetic construct
LVGLAIE

SEQ ID NO: 2108 - protein, 7 aa, synthetic construct
DVNNSVE

SEQ ID NO: 2109 - protein, 7 aa, synthetic construct
CRGVVVE

SEQ ID NO: 2110 - protein, 7 aa, synthetic construct
RCNQVVE

SEQ ID NO: 2111 - protein, 7 aa, synthetic construct
SIKWALE

SEQ ID NO: 2112 - protein, 7 aa, synthetic construct
GGDAMVE

SEQ ID NO: 2113 - protein, 7 aa, synthetic construct
EVGRYMK

SEQ ID NO: 2114 - protein, 7 aa, synthetic construct
IVDIVLE

SEQ ID NO: 2115 - protein, 7 aa, synthetic construct
VVMPDSV

SEQ ID NO: 2116 - protein, 7 aa, synthetic construct
VPGHLLE

SEQ ID NO: 2117 - protein, 7 aa, synthetic construct
VTDRCLE

SEQ ID NO: 2118 - protein, 7 aa, synthetic construct
SCKGIIE

SEQ ID NO: 2119 - protein, 7 aa, synthetic construct
VLERIIE

SEQ ID NO: 2120 - protein, 7 aa, synthetic construct
EAQEVVE

SEQ ID NO: 2121 - protein, 7 aa, synthetic construct
IVDMVDV

SEQ ID NO: 2122 - protein, 7 aa, synthetic construct
ESRCVLE

SEQ ID NO: 2123 - protein, 7 aa, synthetic construct
SNGVDIG

SEQ ID NO: 2124 - protein, 5 aa, synthetic construct
GNVVE

SEQ ID NO: 2125 - protein, 7 aa, synthetic construct
KASPALE

SEQ ID NO: 2126 - protein, 7 aa, synthetic construct
SIDALLE

SEQ ID NO: 2127 - protein, 7 aa, synthetic construct
CRPGVIE

SEQ ID NO: 2128 - protein, 7 aa, synthetic construct
TVEGCVE

SEQ ID NO: 2129 - protein, 7 aa, synthetic construct
TMHDTLE

SEQ ID NO: 2130 - protein, 7 aa, synthetic construct
KYGVVLE

SEQ ID NO: 2131 - protein, 7 aa, synthetic construct
MAAAILE

SEQ ID NO: 2132 - protein, 7 aa, synthetic construct
GLPPFVE

SEQ ID NO: 2133 - protein, 7 aa, synthetic construct
MEGSHLE

SEQ ID NO: 2134 - protein, 7 aa, synthetic construct
RPERLIE

SEQ ID NO: 2135 - protein, 7 aa, synthetic construct
HGNRVLI

SEQ ID NO: 2136 - protein, 7 aa, synthetic construct
GKVKMLE

SEQ ID NO: 2137 - protein, 7 aa, synthetic construct
ISSRCIE

SEQ ID NO: 2138 - protein, 7 aa, synthetic construct
TRGITME

SEQ ID NO: 2139 - protein, 7 aa, synthetic construct
VRGWTIE

SEQ ID NO: 2140 - protein, 7 aa, synthetic construct
VMDCMLE

SEQ ID NO: 2141 - protein, 7 aa, synthetic construct
VVVPMIE

SEQ ID NO: 2142 - protein, 7 aa, synthetic construct
MVDRVSE

SEQ ID NO: 2143 - protein, 7 aa, synthetic construct
LRDDLVE

SEQ ID NO: 2144 - protein, 7 aa, synthetic construct
GRIVFRI

SEQ ID NO: 2145 - protein, 7 aa, synthetic construct
SLNNSIE

SEQ ID NO: 2146 - protein, 7 aa, synthetic construct
HSIGWMI

SEQ ID NO: 2147 - protein, 7 aa, synthetic construct
EGAMRVE

SEQ ID NO: 2148 - protein, 7 aa, synthetic construct
GRGLVIE

SEQ ID NO: 2149 - protein, 7 aa, synthetic construct
TLRNAME

SEQ ID NO: 2150 - protein, 7 aa, synthetic construct
RSRDVLE

SEQ ID NO: 2151 - protein, 7 aa, synthetic construct
NITGHLS

SEQ ID NO: 2152 - protein, 7 aa, synthetic construct
LVDRVVE

SEQ ID NO: 2153 - protein, 7 aa, synthetic construct
IVGGVLE

SEQ ID NO: 2154 - protein, 7 aa, synthetic construct
TRTGVIE

SEQ ID NO: 2155 - protein, 7 aa, synthetic construct
FNGTMIE

SEQ ID NO: 2156 - protein, 7 aa, synthetic construct
NLCKAVE

SEQ ID NO: 2157 - protein, 7 aa, synthetic construct
DGAYALE

SEQ ID NO: 2158 - protein, 7 aa, synthetic construct
TRAVFMD

SEQ ID NO: 2159 - protein, 7 aa, synthetic construct
TRMPVIE

SEQ ID NO: 2160 - protein, 7 aa, synthetic construct
DSRSHIE

SEQ ID NO: 2161 - protein, 7 aa, synthetic construct
GRNMIIE

SEQ ID NO: 2162 - protein, 7 aa, synthetic construct
NGRAYLE

SEQ ID NO: 2163 - protein, 7 aa, synthetic construct
TLGGFLE

SEQ ID NO: 2164 - protein, 7 aa, synthetic construct
HHNQMLI

SEQ ID NO: 2165 - protein, 7 aa, synthetic construct
EDRFYIE

SEQ ID NO: 2166 - protein, 7 aa, synthetic construct
NTDMIWK

SEQ ID NO: 2167 - protein, 7 aa, synthetic construct
SVVKMIE

SEQ ID NO: 2168 - protein, 7 aa, synthetic construct
RAGDCVD

SEQ ID NO: 2169 - protein, 7 aa, synthetic construct
PMIRALE

SEQ ID NO: 2170 - protein, 7 aa, synthetic construct
IRGSGVE

SEQ ID NO: 2171 - protein, 7 aa, synthetic construct
DHAGMLE

SEQ ID NO: 2172 - protein, 7 aa, synthetic construct
IVRNWLE

SEQ ID NO: 2173 - protein, 7 aa, synthetic construct
GFADFME

SEQ ID NO: 2174 - protein, 7 aa, synthetic construct
VNPDCME

SEQ ID NO: 2175 - protein, 7 aa, synthetic construct
QVATVME

SEQ ID NO: 2176 - protein, 7 aa, synthetic construct
KSSDRVE

SEQ ID NO: 2177 - protein, 7 aa, synthetic construct
ISGALMI

SEQ ID NO: 2178 - protein, 7 aa, synthetic construct
RMRVIME

SEQ ID NO: 2179 - protein, 7 aa, synthetic construct
LNGHRIE

SEQ ID NO: 2180 - protein, 7 aa, synthetic construct
GRRGVIE

SEQ ID NO: 2181 - protein, 7 aa, synthetic construct
LDCRVIE

SEQ ID NO: 2182 - protein, 7 aa, synthetic construct
IRHLVIE

SEQ ID NO: 2183 - protein, 7 aa, synthetic construct
VLGDIME

SEQ ID NO: 2184 - protein, 7 aa, synthetic construct
RPETSID

SEQ ID NO: 2185 - protein, 7 aa, synthetic construct
HTENALE

SEQ ID NO: 2186 - protein, 7 aa, synthetic construct
NPRVVIE

SEQ ID NO: 2187 - protein, 7 aa, synthetic construct
MHDVIVE

SEQ ID NO: 2188 - protein, 7 aa, synthetic construct
VSMTVGN

SEQ ID NO: 2189 - protein, 7 aa, synthetic construct
HVGRLVI

SEQ ID NO: 2190 - protein, 7 aa, synthetic construct
FIQHSIE

SEQ ID NO: 2191 - protein, 6 aa, synthetic construct
VLGVLE

SEQ ID NO: 2192 - protein, 7 aa, synthetic construct
NRAPAVE

SEQ ID NO: 2193 - protein, 7 aa, synthetic construct
EIMGTIE

SEQ ID NO: 2194 - protein, 7 aa, synthetic construct
DYMGMLE

SEQ ID NO: 2195 - protein, 7 aa, synthetic construct
MSRDVIR

SEQ ID NO: 2196 - protein, 7 aa, synthetic construct
ILGTVVE

SEQ ID NO: 2197 - protein, 7 aa, synthetic construct
VCGWVLE

SEQ ID NO: 2198 - protein, 7 aa, synthetic construct
FGYMILE

SEQ ID NO: 2199 - protein, 7 aa, synthetic construct
VVSRVME

SEQ ID NO: 2200 - protein, 7 aa, synthetic construct
MIENLIE

SEQ ID NO: 2201 - protein, 7 aa, synthetic construct
QSVVVIE

SEQ ID NO: 2202 - protein, 7 aa, synthetic construct
RLGVILE

SEQ ID NO: 2203 - protein, 6 aa, synthetic construct
TGGAIE

SEQ ID NO: 2204 - protein, 7 aa, synthetic construct
THDGILE

SEQ ID NO: 2205 - protein, 7 aa, synthetic construct
RYSHVVE

SEQ ID NO: 2206 - protein, 7 aa, synthetic construct
AGRDIVE

SEQ ID NO: 2207 - protein, 7 aa, synthetic construct
NMGRMLE

SEQ ID NO: 2208 - protein, 7 aa, synthetic construct
VDGRVLE

SEQ ID NO: 2209 - protein, 7 aa, synthetic construct
LNGPIME

SEQ ID NO: 2210 - protein, 7 aa, synthetic construct
TICEMLE

SEQ ID NO: 2211 - protein, 7 aa, synthetic construct
INGQLVE

SEQ ID NO: 2212 - protein, 7 aa, synthetic construct
GGNWLIE

SEQ ID NO: 2213 - protein, 6 aa, synthetic construct
LENSIE

SEQ ID NO: 2214 - protein, 7 aa, synthetic construct
TRFVFVC

SEQ ID NO: 2215 - protein, 7 aa, synthetic construct
LSDHVVE

SEQ ID NO: 2216 - protein, 7 aa, synthetic construct
AHGVVVD

SEQ ID NO: 2217 - protein, 7 aa, synthetic construct
GSDNALE

SEQ ID NO: 2218 - protein, 7 aa, synthetic construct
KPREVLE

SEQ ID NO: 2219 - protein, 7 aa, synthetic construct
GYGAVVE

SEQ ID NO: 2220 - protein, 7 aa, synthetic construct
NNSVIME

SEQ ID NO: 2221 - protein, 7 aa, synthetic construct
QNGKSIE

SEQ ID NO: 2222 - protein, 7 aa, synthetic construct
QLESVME

SEQ ID NO: 2223 - protein, 7 aa, synthetic construct
MMGIRVE

SEQ ID NO: 2224 - protein, 7 aa, synthetic construct
HIARALE

SEQ ID NO: 2225 - protein, 7 aa, synthetic construct
RLGGAVE

SEQ ID NO: 2226 - protein, 7 aa, synthetic construct
VAGTLLE

SEQ ID NO: 2227 - protein, 7 aa, synthetic construct
VLGDTLE

SEQ ID NO: 2228 - protein, 7 aa, synthetic construct
EGFIEII

SEQ ID NO: 2229 - protein, 7 aa, synthetic construct
WNGLVLE

SEQ ID NO: 2230 - protein, 6 aa, synthetic construct
FGVVIE

SEQ ID NO: 2231 - protein, 7 aa, synthetic construct
AHVLVIE

SEQ ID NO: 2232 - protein, 7 aa, synthetic construct
DPWIVVE

SEQ ID NO: 2233 - protein, 7 aa, synthetic construct
LKKVWME

SEQ ID NO: 2234 - protein, 7 aa, synthetic construct
RWTNVIG

SEQ ID NO: 2235 - protein, 7 aa, synthetic construct
LMAGWSE

SEQ ID NO: 2236 - protein, 7 aa, synthetic construct
RLGFALE

SEQ ID NO: 2237 - protein, 7 aa, synthetic construct
RDDNGLE

SEQ ID NO: 2238 - protein, 7 aa, synthetic construct
FRGYAVE

SEQ ID NO: 2239 - protein, 7 aa, synthetic construct
RWGVVVE

SEQ ID NO: 2240 - protein, 7 aa, synthetic construct
LFNLVME

SEQ ID NO: 2241 - protein, 7 aa, synthetic construct
QICPVLE

SEQ ID NO: 2242 - protein, 7 aa, synthetic construct
RVGLLLE

SEQ ID NO: 2243 - protein, 7 aa, synthetic construct
ATVVRRY

SEQ ID NO: 2244 - protein, 7 aa, synthetic construct
NMDVRVE

SEQ ID NO: 2245 - protein, 7 aa, synthetic construct
SGIVVIE

SEQ ID NO: 2246 - protein, 7 aa, synthetic construct
RYCQAME

SEQ ID NO: 2247 - protein, 7 aa, synthetic construct
DCMILIE

SEQ ID NO: 2248 - protein, 7 aa, synthetic construct
HATGSLE

SEQ ID NO: 2249 - protein, 7 aa, synthetic construct
GTRDWVE

SEQ ID NO: 2250 - protein, 7 aa, synthetic construct
PDCNKVE

SEQ ID NO: 2251 - protein, 7 aa, synthetic construct
MEQGIIE

SEQ ID NO: 2252 - protein, 7 aa, synthetic construct
VSEGQLE

SEQ ID NO: 2253 - protein, 7 aa, synthetic construct
DGGVCFE

SEQ ID NO: 2254 - protein, 7 aa, synthetic construct
SVTGLLE

SEQ ID NO: 2255 - protein, 7 aa, synthetic construct
HGVRFIE

SEQ ID NO: 2256 - protein, 7 aa, synthetic construct
RTSVVLE

SEQ ID NO: 2257 - protein, 7 aa, synthetic construct
IDDVKVE

SEQ ID NO: 2258 - protein, 7 aa, synthetic construct
HAPRVVE

SEQ ID NO: 2259 - protein, 7 aa, synthetic construct
KVAELII

SEQ ID NO: 2260 - protein, 7 aa, synthetic construct
DRRTALE

SEQ ID NO: 2261 - protein, 7 aa, synthetic construct
SDGVRLE

SEQ ID NO: 2262 - protein, 7 aa, synthetic construct
MRENRIE

SEQ ID NO: 2263 - protein, 7 aa, synthetic construct
VNSVVVE

SEQ ID NO: 2264 - protein, 4 aa, synthetic construct
GYLE

SEQ ID NO: 2265 - protein, 7 aa, synthetic construct
SLERSLF

SEQ ID NO: 2266 - protein, 7 aa, synthetic construct
EIGVILE

SEQ ID NO: 2267 - protein, 7 aa, synthetic construct
DVGDLME

SEQ ID NO: 2268 - protein, 7 aa, synthetic construct
CCGRKLE

SEQ ID NO: 2269 - protein, 7 aa, synthetic construct
QNRRTIE

SEQ ID NO: 2270 - protein, 7 aa, synthetic construct
SVSLAAI

SEQ ID NO: 2271 - protein, 7 aa, synthetic construct
VGSGTLE

SEQ ID NO: 2272 - protein, 7 aa, synthetic construct
IGGSIME

SEQ ID NO: 2273 - protein, 7 aa, synthetic construct
CAMYVIE

SEQ ID NO: 2274 - protein, 7 aa, synthetic construct
MLGTLVD

SEQ ID NO: 2275 - protein, 7 aa, synthetic construct
RVCHVIE

SEQ ID NO: 2276 - protein, 7 aa, synthetic construct
HVNDYIM

SEQ ID NO: 2277 - protein, 7 aa, synthetic construct
APGRMIE

SEQ ID NO: 2278 - protein, 7 aa, synthetic construct
KNAMSIE

SEQ ID NO: 2279 - protein, 7 aa, synthetic construct
HRNQVLE

SEQ ID NO: 2280 - protein, 7 aa, synthetic construct
SVRTVWS

SEQ ID NO: 2281 - protein, 7 aa, synthetic construct
RCGMTLE

SEQ ID NO: 2282 - protein, 7 aa, synthetic construct
GACRILE

SEQ ID NO: 2283 - protein, 7 aa, synthetic construct
DAAHVLE

SEQ ID NO: 2284 - protein, 7 aa, synthetic construct
LFGLEGQ

SEQ ID NO: 2285 - protein, 7 aa, synthetic construct
VAVKVIE

SEQ ID NO: 2286 - protein, 7 aa, synthetic construct
IEGFQLG

SEQ ID NO: 2287 - protein, 7 aa, synthetic construct
KCARIIE

SEQ ID NO: 2288 - protein, 7 aa, synthetic construct
LKAQFIE

SEQ ID NO: 2289 - protein, 7 aa, synthetic construct
SIDAGIW

SEQ ID NO: 2290 - protein, 7 aa, synthetic construct
PMLEILE

SEQ ID NO: 2291 - protein, 7 aa, synthetic construct
NREDSIE

SEQ ID NO: 2292 - protein, 7 aa, synthetic construct
TTDDSSE

SEQ ID NO: 2293 - protein, 7 aa, synthetic construct
NVRGMIE

SEQ ID NO: 2294 - protein, 7 aa, synthetic construct
YRIVFNE

SEQ ID NO: 2295 - protein, 7 aa, synthetic construct
DDRTIME

SEQ ID NO: 2296 - protein, 7 aa, synthetic construct
PRCIIIE

SEQ ID NO: 2297 - protein, 7 aa, synthetic construct
SMGWMIE

SEQ ID NO: 2298 - protein, 7 aa, synthetic construct
GIGVGLE

SEQ ID NO: 2299 - protein, 7 aa, synthetic construct
IRGGVLE

SEQ ID NO: 2300 - protein, 7 aa, synthetic construct
MFEAAVE

SEQ ID NO: 2301 - protein, 7 aa, synthetic construct
VTGWVLE

SEQ ID NO: 2302 - protein, 7 aa, synthetic construct
SKRIVVE

SEQ ID NO: 2303 - protein, 7 aa, synthetic construct
RRFVFCG

SEQ ID NO: 2304 - protein, 7 aa, synthetic construct
VMNQILE

SEQ ID NO: 2305 - protein, 7 aa, synthetic construct
IDKGGLE

SEQ ID NO: 2306 - protein, 7 aa, synthetic construct
MTYDVGA

SEQ ID NO: 2307 - protein, 7 aa, synthetic construct
NGWWVLE

SEQ ID NO: 2308 - protein, 7 aa, synthetic construct
CIGRVLE

SEQ ID NO: 2309 - protein, 7 aa, synthetic construct
HMITVVE

SEQ ID NO: 2310 - protein, 7 aa, synthetic construct
HILASYW

SEQ ID NO: 2311 - protein, 7 aa, synthetic construct
GGRLMVE

SEQ ID NO: 2312 - protein, 7 aa, synthetic construct
GAYVTIE

SEQ ID NO: 2313 - protein, 7 aa, synthetic construct
DIVGCVE

SEQ ID NO: 2314 - protein, 7 aa, synthetic construct
FRVVFIA

SEQ ID NO: 2315 - protein, 7 aa, synthetic construct
QVMVTLE

SEQ ID NO: 2316 - protein, 7 aa, synthetic construct
KMRKVLE

SEQ ID NO: 2317 - protein, 7 aa, synthetic construct
NIYADWD

SEQ ID NO: 2318 - protein, 7 aa, synthetic construct
LGEGMLE

SEQ ID NO: 2319 - protein, 5 aa, synthetic construct
RWVME

SEQ ID NO: 2320 - protein, 7 aa, synthetic construct
NVKGVLE

SEQ ID NO: 2321 - protein, 7 aa, synthetic construct
VIYSVIE

SEQ ID NO: 2322 - protein, 7 aa, synthetic construct
RVMNIFE

SEQ ID NO: 2323 - protein, 7 aa, synthetic construct
SLNMIME

SEQ ID NO: 2324 - protein, 7 aa, synthetic construct
VGAEIVE

SEQ ID NO: 2325 - protein, 7 aa, synthetic construct
MLAQVIE

SEQ ID NO: 2326 - protein, 7 aa, synthetic construct
MQSALLE

SEQ ID NO: 2327 - protein, 7 aa, synthetic construct
QWTVFEG

SEQ ID NO: 2328 - protein, 7 aa, synthetic construct
DVRAGLE

SEQ ID NO: 2329 - protein, 7 aa, synthetic construct
GRIVFRH

SEQ ID NO: 2330 - protein, 7 aa, synthetic construct
MQGLVLE

SEQ ID NO: 2331 - protein, 7 aa, synthetic construct
INAIIVE

SEQ ID NO: 2332 - protein, 7 aa, synthetic construct
MMGRVLE

SEQ ID NO: 2333 - protein, 7 aa, synthetic construct
WRFHVLA

SEQ ID NO: 2334 - protein, 7 aa, synthetic construct
SNTHVVE

SEQ ID NO: 2335 - protein, 7 aa, synthetic construct
LGDHVLE

SEQ ID NO: 2336 - protein, 7 aa, synthetic construct
KYTNVVE

SEQ ID NO: 2337 - protein, 7 aa, synthetic construct
LSDIILE

SEQ ID NO: 2338 - protein, 7 aa, synthetic construct
RRLVVLE

SEQ ID NO: 2339 - protein, 7 aa, synthetic construct
VRGLGID

SEQ ID NO: 2340 - protein, 7 aa, synthetic construct
NLGEVLE

SEQ ID NO: 2341 - protein, 7 aa, synthetic construct
NTISLME

SEQ ID NO: 2342 - protein, 7 aa, synthetic construct
LVRGMVV

SEQ ID NO: 2343 - protein, 7 aa, synthetic construct
DRSGLME

SEQ ID NO: 2344 - protein, 7 aa, synthetic construct
CRGTMVE

SEQ ID NO: 2345 - protein, 7 aa, synthetic construct
PYKAGME

SEQ ID NO: 2346 - protein, 7 aa, synthetic construct
IVGGLME

SEQ ID NO: 2347 - protein, 7 aa, synthetic construct
IKNLDSY

SEQ ID NO: 2348 - protein, 7 aa, synthetic construct
VADFVVE

SEQ ID NO: 2349 - protein, 7 aa, synthetic construct
SSGGMVE

SEQ ID NO: 2350 - protein, 7 aa, synthetic construct
TDRVMIE

SEQ ID NO: 2351 - protein, 7 aa, synthetic construct
VGLMAIE

SEQ ID NO: 2352 - protein, 7 aa, synthetic construct
PRDGLVE

SEQ ID NO: 2353 - protein, 7 aa, synthetic construct
RRTVFMG

SEQ ID NO: 2354 - protein, 7 aa, synthetic construct
IRNTRIE

SEQ ID NO: 2355 - protein, 7 aa, synthetic construct
ELKDHLE

SEQ ID NO: 2356 - protein, 7 aa, synthetic construct
MTETGFR

SEQ ID NO: 2357 - protein, 7 aa, synthetic construct
EGLRILE

SEQ ID NO: 2358 - protein, 7 aa, synthetic construct
DAREMME

SEQ ID NO: 2359 - protein, 7 aa, synthetic construct
PIGVRLE

SEQ ID NO: 2360 - protein, 7 aa, synthetic construct
IDDVIVE

SEQ ID NO: 2361 - protein, 7 aa, synthetic construct
VVGVLMI

SEQ ID NO: 2362 - protein, 7 aa, synthetic construct
TQGMIVE

SEQ ID NO: 2363 - protein, 7 aa, synthetic construct
SIADVLE

SEQ ID NO: 2364 - protein, 7 aa, synthetic construct
VVGHGLE

SEQ ID NO: 2365 - protein, 7 aa, synthetic construct
LVTMPME

SEQ ID NO: 2366 - protein, 7 aa, synthetic construct
ADGCFLE

SEQ ID NO: 2367 - protein, 7 aa, synthetic construct
SYIAFVG

SEQ ID NO: 2368 - protein, 7 aa, synthetic construct
VSCFLVE

SEQ ID NO: 2369 - protein, 7 aa, synthetic construct
ISGNFVE

SEQ ID NO: 2370 - protein, 7 aa, synthetic construct
LTVVVVE

SEQ ID NO: 2371 - protein, 7 aa, synthetic construct
PVTRYME

SEQ ID NO: 2372 - protein, 7 aa, synthetic construct
LSGHVLE

SEQ ID NO: 2373 - protein, 7 aa, synthetic construct
ASGNWLE

SEQ ID NO: 2374 - protein, 7 aa, synthetic construct
INRGILE

SEQ ID NO: 2375 - protein, 7 aa, synthetic construct
DCYRSIV

SEQ ID NO: 2376 - protein, 7 aa, synthetic construct
ANKECVE

SEQ ID NO: 2377 - protein, 7 aa, synthetic construct
RIRLVIE

SEQ ID NO: 2378 - protein, 7 aa, synthetic construct
NMKRMLE

SEQ ID NO: 2379 - protein, 7 aa, synthetic construct
WDDNGVD

SEQ ID NO: 2380 - protein, 7 aa, synthetic construct
VEGRVVE

SEQ ID NO: 2381 - protein, 7 aa, synthetic construct
KVNDVVE

SEQ ID NO: 2382 - protein, 7 aa, synthetic construct
TVGLVVE

SEQ ID NO: 2383 - protein, 7 aa, synthetic construct
RIRSVME

SEQ ID NO: 2384 - protein, 7 aa, synthetic construct
GTDRRLE

SEQ ID NO: 2385 - protein, 7 aa, synthetic construct
LTGLIVE

SEQ ID NO: 2386 - protein, 7 aa, synthetic construct
IVDVVIE

SEQ ID NO: 2387 - protein, 7 aa, synthetic construct
TVSGLVE

SEQ ID NO: 2388 - protein, 7 aa, synthetic construct
IVSKVLE

SEQ ID NO: 2389 - protein, 7 aa, synthetic construct
VNGGFTH

SEQ ID NO: 2390 - protein, 7 aa, synthetic construct
PIGFVIE

SEQ ID NO: 2391 - protein, 7 aa, synthetic construct
HMNDVIV

SEQ ID NO: 2392 - protein, 7 aa, synthetic construct
DVIVFTP

SEQ ID NO: 2393 - protein, 6 aa, synthetic construct
TAPLLE

SEQ ID NO: 2394 - protein, 6 aa, synthetic construct
LTFFME

SEQ ID NO: 2395 - protein, 7 aa, synthetic construct
NLCSIIE

SEQ ID NO: 2396 - protein, 7 aa, synthetic construct
FMVVFNG

SEQ ID NO: 2397 - protein, 7 aa, synthetic construct
KVRDRGR

SEQ ID NO: 2398 - protein, 7 aa, synthetic construct
LGSIVIE

SEQ ID NO: 2399 - protein, 7 aa, synthetic construct
NYVNGWS

SEQ ID NO: 2400 - protein, 7 aa, synthetic construct
LAALALE

SEQ ID NO: 2401 - protein, 7 aa, synthetic construct
RNVAVTD

SEQ ID NO: 2402 - protein, 7 aa, synthetic construct
IDHTIVE

SEQ ID NO: 2403 - protein, 7 aa, synthetic construct
GRQGPLE

SEQ ID NO: 2404 - protein, 7 aa, synthetic construct
SDVVMME

SEQ ID NO: 2405 - protein, 7 aa, synthetic construct
GGASILE

SEQ ID NO: 2406 - protein, 7 aa, synthetic construct
QMRMLME

SEQ ID NO: 2407 - protein, 7 aa, synthetic construct
GGIGYRS

SEQ ID NO: 2408 - protein, 7 aa, synthetic construct
SSASYVE

SEQ ID NO: 2409 - protein, 7 aa, synthetic construct
CMNGVME

SEQ ID NO: 2410 - protein, 7 aa, synthetic construct
KHAGVLE

SEQ ID NO: 2411 - protein, 7 aa, synthetic construct
GRRGVVE

SEQ ID NO: 2412 - protein, 7 aa, synthetic construct
SGGRVLE

SEQ ID NO: 2413 - protein, 7 aa, synthetic construct
KAKVVLE

SEQ ID NO: 2414 - protein, 7 aa, synthetic construct
CANRSGE

SEQ ID NO: 2415 - protein, 7 aa, synthetic construct
SSVRIIE

SEQ ID NO: 2416 - protein, 7 aa, synthetic construct
DHRSFLE

SEQ ID NO: 2417 - protein, 7 aa, synthetic construct
NLHVILE

SEQ ID NO: 2418 - protein, 7 aa, synthetic construct
LRDGLVE

SEQ ID NO: 2419 - protein, 7 aa, synthetic construct
SAVGFIE

SEQ ID NO: 2420 - protein, 7 aa, synthetic construct
KMSSMLE

SEQ ID NO: 2421 - protein, 7 aa, synthetic construct
NSGSMIE

SEQ ID NO: 2422 - protein, 7 aa, synthetic construct
DFGRMLE

SEQ ID NO: 2423 - protein, 7 aa, synthetic construct
VNALVIE

SEQ ID NO: 2424 - protein, 7 aa, synthetic construct
GEVEVVE

SEQ ID NO: 2425 - protein, 7 aa, synthetic construct
VARAPLE

SEQ ID NO: 2426 - protein, 7 aa, synthetic construct
RTDQFIE

SEQ ID NO: 2427 - protein, 7 aa, synthetic construct
NMDDTLE

SEQ ID NO: 2428 - protein, 7 aa, synthetic construct
ITGMMIE

SEQ ID NO: 2429 - protein, 7 aa, synthetic construct
SRIVFVL

SEQ ID NO: 2430 - protein, 7 aa, synthetic construct
LVGIVIE

SEQ ID NO: 2431 - protein, 7 aa, synthetic construct
TTDRIME

SEQ ID NO: 2432 - protein, 7 aa, synthetic construct
DIRMMVE

SEQ ID NO: 2433 - protein, 7 aa, synthetic construct
LIRDFLE

SEQ ID NO: 2434 - protein, 7 aa, synthetic construct
CVKGVGE

SEQ ID NO: 2435 - protein, 7 aa, synthetic construct
VAGWGLE

SEQ ID NO: 2436 - protein, 7 aa, synthetic construct
WRGVQVE

SEQ ID NO: 2437 - protein, 7 aa, synthetic construct
IGDIIME

SEQ ID NO: 2438 - protein, 6 aa, synthetic construct
SDQAIE

SEQ ID NO: 2439 - protein, 7 aa, synthetic construct
DRVVFRN

SEQ ID NO: 2440 - protein, 7 aa, synthetic construct
WKEIGIE

SEQ ID NO: 2441 - protein, 7 aa, synthetic construct
LNGGYME

SEQ ID NO: 2442 - protein, 7 aa, synthetic construct
VAMSDIL

SEQ ID NO: 2443 - protein, 7 aa, synthetic construct
RMESLVE

SEQ ID NO: 2444 - protein, 7 aa, synthetic construct
QLSRVLE

SEQ ID NO: 2445 - protein, 7 aa, synthetic construct
IAEDCIE

SEQ ID NO: 2446 - protein, 7 aa, synthetic construct
IRDMLLE

SEQ ID NO: 2447 - protein, 7 aa, synthetic construct
MDDVALE

SEQ ID NO: 2448 - protein, 7 aa, synthetic construct
LMRVPME

SEQ ID NO: 2449 - protein, 7 aa, synthetic construct
MIAEAME

SEQ ID NO: 2450 - protein, 7 aa, synthetic construct
LNMMPME

SEQ ID NO: 2451 - protein, 7 aa, synthetic construct
LQAKILE

SEQ ID NO: 2452 - protein, 7 aa, synthetic construct
IEDNVLE

SEQ ID NO: 2453 - protein, 7 aa, synthetic construct
LMALVME

SEQ ID NO: 2454 - protein, 7 aa, synthetic construct
ATADIVD

SEQ ID NO: 2455 - protein, 7 aa, synthetic construct
KLEQVLE

SEQ ID NO: 2456 - protein, 7 aa, synthetic construct
KRIVFVT

SEQ ID NO: 2457 - protein, 7 aa, synthetic construct
VKYQVIE

SEQ ID NO: 2458 - protein, 7 aa, synthetic construct
GGGIILE

SEQ ID NO: 2459 - protein, 7 aa, synthetic construct
RRGVVIE

SEQ ID NO: 2460 - protein, 7 aa, synthetic construct
EGLIYLE

SEQ ID NO: 2461 - protein, 7 aa, synthetic construct
SVKRKLE

SEQ ID NO: 2462 - protein, 7 aa, synthetic construct
YLNVEAR

SEQ ID NO: 2463 - protein, 7 aa, synthetic construct
HGGPYME

SEQ ID NO: 2464 - protein, 7 aa, synthetic construct
AWENMLE

SEQ ID NO: 2465 - protein, 7 aa, synthetic construct
NPLGVLE

SEQ ID NO: 2466 - protein, 7 aa, synthetic construct
NRGMCIE

SEQ ID NO: 2467 - protein, 7 aa, synthetic construct
YRGSMME

SEQ ID NO: 2468 - protein, 7 aa, synthetic construct
NVAGALE

SEQ ID NO: 2469 - protein, 7 aa, synthetic construct
KSRRMTV

SEQ ID NO: 2470 - protein, 7 aa, synthetic construct
GSAEFIE

SEQ ID NO: 2471 - protein, 7 aa, synthetic construct
LKGDVME

SEQ ID NO: 2472 - protein, 7 aa, synthetic construct
FITVLLE

SEQ ID NO: 2473 - protein, 7 aa, synthetic construct
LMCLVVE

SEQ ID NO: 2474 - protein, 7 aa, synthetic construct
IETIFLE

SEQ ID NO: 2475 - protein, 7 aa, synthetic construct
RGASHIE

SEQ ID NO: 2476 - protein, 7 aa, synthetic construct
ILFVFRE

SEQ ID NO: 2477 - protein, 7 aa, synthetic construct
MVGDIQE

SEQ ID NO: 2478 - protein, 7 aa, synthetic construct
YFALVSH

SEQ ID NO: 2479 - protein, 7 aa, synthetic construct
NCKHMME

SEQ ID NO: 2480 - protein, 7 aa, synthetic construct
GRIGFVE

SEQ ID NO: 2481 - protein, 7 aa, synthetic construct
SATDFME

SEQ ID NO: 2482 - protein, 7 aa, synthetic construct
SDGAWME

SEQ ID NO: 2483 - protein, 7 aa, synthetic construct
SAKDRVE

SEQ ID NO: 2484 - protein, 7 aa, synthetic construct
LANNALE

SEQ ID NO: 2485 - protein, 7 aa, synthetic construct
VSGIAME

SEQ ID NO: 2486 - protein, 7 aa, synthetic construct
ITAVKIE

SEQ ID NO: 2487 - protein, 7 aa, synthetic construct
GIGQLIE

SEQ ID NO: 2488 - protein, 7 aa, synthetic construct
GMSQLLE

SEQ ID NO: 2489 - protein, 7 aa, synthetic construct
DRGFYME

SEQ ID NO: 2490 - protein, 7 aa, synthetic construct
LVCVVVE

SEQ ID NO: 2491 - protein, 7 aa, synthetic construct
DRRVVVE

SEQ ID NO: 2492 - protein, 7 aa, synthetic construct
AMKLFIE

SEQ ID NO: 2493 - protein, 7 aa, synthetic construct
IGKFVIE

SEQ ID NO: 2494 - protein, 7 aa, synthetic construct
FGSAILV

SEQ ID NO: 2495 - protein, 7 aa, synthetic construct
DNGQWME

SEQ ID NO: 2496 - protein, 7 aa, synthetic construct
TGVSPVI

SEQ ID NO: 2497 - protein, 7 aa, synthetic construct
RDASVLG

SEQ ID NO: 2498 - protein, 7 aa, synthetic construct
SRIVFNR

SEQ ID NO: 2499 - protein, 7 aa, synthetic construct
LTSLVLE

SEQ ID NO: 2500 - protein, 7 aa, synthetic construct
WVGLVVE

SEQ ID NO: 2501 - protein, 7 aa, synthetic construct
MYGILVE

SEQ ID NO: 2502 - protein, 7 aa, synthetic construct
VGGRDES

SEQ ID NO: 2503 - protein, 7 aa, synthetic construct
HMETGIE

SEQ ID NO: 2504 - protein, 7 aa, synthetic construct
HVLRTVE

SEQ ID NO: 2505 - protein, 7 aa, synthetic construct
LIGVIVE

SEQ ID NO: 2506 - protein, 7 aa, synthetic construct
NIMGMIE

SEQ ID NO: 2507 - protein, 7 aa, synthetic construct
LAGVTIE

SEQ ID NO: 2508 - protein, 7 aa, synthetic construct
QNGLTVE

SEQ ID NO: 2509 - protein, 7 aa, synthetic construct
LVIERDI

SEQ ID NO: 2510 - protein, 7 aa, synthetic construct
SDRNVIE

SEQ ID NO: 2511 - protein, 7 aa, synthetic construct
DVCGLLE

SEQ ID NO: 2512 - protein, 7 aa, synthetic construct
IDGMLME

SEQ ID NO: 2513 - protein, 7 aa, synthetic construct
GNPGIIE

SEQ ID NO: 2514 - protein, 7 aa, synthetic construct
VRHGFME

SEQ ID NO: 2515 - protein, 7 aa, synthetic construct
SRVAFLE

SEQ ID NO: 2516 - protein, 7 aa, synthetic construct
LGVSVLE

SEQ ID NO: 2517 - protein, 7 aa, synthetic construct
GMMGWLE

SEQ ID NO: 2518 - protein, 7 aa, synthetic construct
IRDRVLE

SEQ ID NO: 2519 - protein, 7 aa, synthetic construct
PIVSVLE

SEQ ID NO: 2520 - protein, 7 aa, synthetic construct
TQEWCLI

SEQ ID NO: 2521 - protein, 7 aa, synthetic construct
DGGHRVE

SEQ ID NO: 2522 - protein, 7 aa, synthetic construct
NLSTALE

SEQ ID NO: 2523 - protein, 7 aa, synthetic construct
PFPQYMS

SEQ ID NO: 2524 - protein, 7 aa, synthetic construct
VGSSVVE

SEQ ID NO: 2525 - protein, 7 aa, synthetic construct
DLTNGLS

SEQ ID NO: 2526 - protein, 7 aa, synthetic construct
CKESLME

SEQ ID NO: 2527 - protein, 7 aa, synthetic construct
MGQNAIE

SEQ ID NO: 2528 - protein, 7 aa, synthetic construct
IMGNVVG

SEQ ID NO: 2529 - protein, 7 aa, synthetic construct
TQGVLLE

SEQ ID NO: 2530 - protein, 7 aa, synthetic construct
LMRGVLE

SEQ ID NO: 2531 - protein, 7 aa, synthetic construct
SLVVVIE

SEQ ID NO: 2532 - protein, 7 aa, synthetic construct
MGGRVIE

SEQ ID NO: 2533 - protein, 7 aa, synthetic construct
RSGSAIE

SEQ ID NO: 2534 - protein, 7 aa, synthetic construct
RIGIVVE

SEQ ID NO: 2535 - protein, 7 aa, synthetic construct
RRLVFIL

SEQ ID NO: 2536 - protein, 7 aa, synthetic construct
LSGGALE

SEQ ID NO: 2537 - protein, 7 aa, synthetic construct
HVMDVLE

SEQ ID NO: 2538 - protein, 7 aa, synthetic construct
TGQAVLE

SEQ ID NO: 2539 - protein, 7 aa, synthetic construct
QEEFRLE

SEQ ID NO: 2540 - protein, 7 aa, synthetic construct
HVNGVLE

SEQ ID NO: 2541 - protein, 7 aa, synthetic construct
QGTDVME

SEQ ID NO: 2542 - protein, 7 aa, synthetic construct
MIGYVME

SEQ ID NO: 2543 - protein, 7 aa, synthetic construct
HGEDNIE

SEQ ID NO: 2544 - protein, 7 aa, synthetic construct
VVEARSR

SEQ ID NO: 2545 - protein, 7 aa, synthetic construct
CGEGRLE

SEQ ID NO: 2546 - protein, 7 aa, synthetic construct
LVEKVIE

SEQ ID NO: 2547 - protein, 7 aa, synthetic construct
DVGHMVE

SEQ ID NO: 2548 - protein, 7 aa, synthetic construct
VIKCRVS

SEQ ID NO: 2549 - protein, 7 aa, synthetic construct
MVTKVIE

SEQ ID NO: 2550 - protein, 7 aa, synthetic construct
SMESIME

SEQ ID NO: 2551 - protein, 7 aa, synthetic construct
RPVSVIE

SEQ ID NO: 2552 - protein, 7 aa, synthetic construct
HVGRMLE

SEQ ID NO: 2553 - protein, 7 aa, synthetic construct
NCAGALE

SEQ ID NO: 2554 - protein, 7 aa, synthetic construct
KLEVGLE

SEQ ID NO: 2555 - protein, 7 aa, synthetic construct
VRGQVLE

SEQ ID NO: 2556 - protein, 7 aa, synthetic construct
QGFGIVE

SEQ ID NO: 2557 - protein, 7 aa, synthetic construct
TRMVFIG

SEQ ID NO: 2558 - protein, 7 aa, synthetic construct
ALSLMIE

SEQ ID NO: 2559 - protein, 7 aa, synthetic construct
APDGTIE

SEQ ID NO: 2560 - protein, 7 aa, synthetic construct
RLWGILE

SEQ ID NO: 2561 - protein, 7 aa, synthetic construct
VSDSGVE

SEQ ID NO: 2562 - protein, 7 aa, synthetic construct
GCLDVLE

SEQ ID NO: 2563 - protein, 7 aa, synthetic construct
CRLRMIE

SEQ ID NO: 2564 - protein, 7 aa, synthetic construct
GSVYVIE

SEQ ID NO: 2565 - protein, 7 aa, synthetic construct
STNSVVE

SEQ ID NO: 2566 - protein, 7 aa, synthetic construct
QGVILEA

SEQ ID NO: 2567 - protein, 6 aa, synthetic construct
INGVWW

SEQ ID NO: 2568 - protein, 7 aa, synthetic construct
DITGIVE

SEQ ID NO: 2569 - protein, 7 aa, synthetic construct
ERVVGVG

SEQ ID NO: 2570 - protein, 7 aa, synthetic construct
ELECVVE

SEQ ID NO: 2571 - protein, 7 aa, synthetic construct
MEGDLVE

SEQ ID NO: 2572 - protein, 7 aa, synthetic construct
LMRQALE

SEQ ID NO: 2573 - protein, 7 aa, synthetic construct
GAITVFD

SEQ ID NO: 2574 - protein, 7 aa, synthetic construct
STLQILE

SEQ ID NO: 2575 - protein, 7 aa, synthetic construct
PGTLIVE

SEQ ID NO: 2576 - protein, 7 aa, synthetic construct
LRGTVLE

SEQ ID NO: 2577 - protein, 7 aa, synthetic construct
NVKNKVE

SEQ ID NO: 2578 - protein, 7 aa, synthetic construct
NVDRILE

SEQ ID NO: 2579 - protein, 7 aa, synthetic construct
IVKGVIE

SEQ ID NO: 2580 - protein, 7 aa, synthetic construct
VMVVIVY

SEQ ID NO: 2581 - protein, 7 aa, synthetic construct
PCTHMIS

SEQ ID NO: 2582 - protein, 7 aa, synthetic construct
KLGRLLE

SEQ ID NO: 2583 - protein, 7 aa, synthetic construct
MTRIQLE

SEQ ID NO: 2584 - protein, 7 aa, synthetic construct
QLMRVME

SEQ ID NO: 2585 - protein, 7 aa, synthetic construct
SWRFIWW

SEQ ID NO: 2586 - protein, 7 aa, synthetic construct
HSNGRIE

SEQ ID NO: 2587 - protein, 7 aa, synthetic construct
RWREVVD

SEQ ID NO: 2588 - protein, 7 aa, synthetic construct
MGCTCLE

SEQ ID NO: 2589 - protein, 7 aa, synthetic construct
RDNRVVE

SEQ ID NO: 2590 - protein, 7 aa, synthetic construct
IAGNLLE

SEQ ID NO: 2591 - protein, 7 aa, synthetic construct
QCRQVIE

SEQ ID NO: 2592 - protein, 7 aa, synthetic construct
TEGIIME

SEQ ID NO: 2593 - protein, 7 aa, synthetic construct
TGRMFVE

SEQ ID NO: 2594 - protein, 7 aa, synthetic construct
RAKHCVE

SEQ ID NO: 2595 - protein, 7 aa, synthetic construct
TKANVVE

SEQ ID NO: 2596 - protein, 7 aa, synthetic construct
SGVVLIE

SEQ ID NO: 2597 - protein, 7 aa, synthetic construct
FPGIQLE

SEQ ID NO: 2598 - protein, 7 aa, synthetic construct
FVGVMLE

SEQ ID NO: 2599 - protein, 7 aa, synthetic construct
MDVLEGQ

SEQ ID NO: 2600 - protein, 7 aa, synthetic construct
VTRRVLE

SEQ ID NO: 2601 - protein, 7 aa, synthetic construct
AVRVVSP

SEQ ID NO: 2602 - protein, 7 aa, synthetic construct
LVGHVLE

SEQ ID NO: 2603 - protein, 7 aa, synthetic construct
HVKGWVD

SEQ ID NO: 2604 - protein, 7 aa, synthetic construct
GLEYVLE

SEQ ID NO: 2605 - protein, 7 aa, synthetic construct
VKRVMVE

SEQ ID NO: 2606 - protein, 6 aa, synthetic construct
CLTWIE

SEQ ID NO: 2607 - protein, 7 aa, synthetic construct
GERCSID

SEQ ID NO: 2608 - protein, 7 aa, synthetic construct
GKRAWLE

SEQ ID NO: 2609 - protein, 7 aa, synthetic construct
VHGSPLE

SEQ ID NO: 2610 - protein, 7 aa, synthetic construct
GVIVEDW

SEQ ID NO: 2611 - protein, 7 aa, synthetic construct
MATVIVE

SEQ ID NO: 2612 - protein, 7 aa, synthetic construct
HIRRVIE

SEQ ID NO: 2613 - protein, 7 aa, synthetic construct
MMAKGLE

SEQ ID NO: 2614 - protein, 7 aa, synthetic construct
YVGRRDQ

SEQ ID NO: 2615 - protein, 7 aa, synthetic construct
GLLNVIE

SEQ ID NO: 2616 - protein, 7 aa, synthetic construct
VTHRVLE

SEQ ID NO: 2617 - protein, 7 aa, synthetic construct
ARNHIVE

SEQ ID NO: 2618 - protein, 7 aa, synthetic construct
VVVTPME

SEQ ID NO: 2619 - protein, 7 aa, synthetic construct
RKQRIME

SEQ ID NO: 2620 - protein, 7 aa, synthetic construct
HGRMLME

SEQ ID NO: 2621 - protein, 7 aa, synthetic construct
TNEAVIE

SEQ ID NO: 2622 - protein, 7 aa, synthetic construct
VSNAILE

SEQ ID NO: 2623 - protein, 7 aa, synthetic construct
LKGIQLE

SEQ ID NO: 2624 - protein, 7 aa, synthetic construct
IVDNVIE

SEQ ID NO: 2625 - protein, 7 aa, synthetic construct
GIIGVLE

SEQ ID NO: 2626 - protein, 7 aa, synthetic construct
GFGELME

SEQ ID NO: 2627 - protein, 7 aa, synthetic construct
IHHIVVE

SEQ ID NO: 2628 - protein, 7 aa, synthetic construct
VCGVGIE

SEQ ID NO: 2629 - protein, 7 aa, synthetic construct
KLRNELE

SEQ ID NO: 2630 - protein, 7 aa, synthetic construct
LSRLFGV

SEQ ID NO: 2631 - protein, 7 aa, synthetic construct
VNTVFRN

SEQ ID NO: 2632 - protein, 7 aa, synthetic construct
LRDRFLE

SEQ ID NO: 2633 - protein, 7 aa, synthetic construct
ARGVMVE

SEQ ID NO: 2634 - protein, 7 aa, synthetic construct
HRIVFTD

SEQ ID NO: 2635 - protein, 7 aa, synthetic construct
IGLSLIE

SEQ ID NO: 2636 - protein, 7 aa, synthetic construct
RLTRVME

SEQ ID NO: 2637 - protein, 7 aa, synthetic construct
LDGKFIL

SEQ ID NO: 2638 - protein, 7 aa, synthetic construct
DMGQSLE

SEQ ID NO: 2639 - protein, 7 aa, synthetic construct
SVVRVLE

SEQ ID NO: 2640 - protein, 7 aa, synthetic construct
IKGVRIE

SEQ ID NO: 2641 - protein, 7 aa, synthetic construct
RDDGHVE

SEQ ID NO: 2642 - protein, 7 aa, synthetic construct
ILESVLE

SEQ ID NO: 2643 - protein, 7 aa, synthetic construct
IEARMVE

SEQ ID NO: 2644 - protein, 7 aa, synthetic construct
GIPLIVD

SEQ ID NO: 2645 - protein, 7 aa, synthetic construct
VHMIIVE

SEQ ID NO: 2646 - protein, 7 aa, synthetic construct
GIRDVME

SEQ ID NO: 2647 - protein, 7 aa, synthetic construct
RIMGGLE

SEQ ID NO: 2648 - protein, 7 aa, synthetic construct
HVQSFVE

SEQ ID NO: 2649 - protein, 7 aa, synthetic construct
GMVITIE

SEQ ID NO: 2650 - protein, 7 aa, synthetic construct
NRHSIIE

SEQ ID NO: 2651 - protein, 7 aa, synthetic construct
GLALQIR

SEQ ID NO: 2652 - protein, 7 aa, synthetic construct
MNGIMME

SEQ ID NO: 2653 - protein, 7 aa, synthetic construct
VVNRILA

SEQ ID NO: 2654 - protein, 7 aa, synthetic construct
RFGELIE

SEQ ID NO: 2655 - protein, 7 aa, synthetic construct
VLLGSIE

SEQ ID NO: 2656 - protein, 7 aa, synthetic construct
IIGLTVE

SEQ ID NO: 2657 - protein, 7 aa, synthetic construct
GRLGSDW

SEQ ID NO: 2658 - protein, 7 aa, synthetic construct
INRNSIE

SEQ ID NO: 2659 - protein, 7 aa, synthetic construct
DIYHVIE

SEQ ID NO: 2660 - protein, 7 aa, synthetic construct
VLDVFIE

SEQ ID NO: 2661 - protein, 7 aa, synthetic construct
DIPGALE

SEQ ID NO: 2662 - protein, 7 aa, synthetic construct
KVPGVIE

SEQ ID NO: 2663 - protein, 7 aa, synthetic construct
IGAWILE

SEQ ID NO: 2664 - protein, 7 aa, synthetic construct
PKRIIVE

SEQ ID NO: 2665 - protein, 7 aa, synthetic construct
NRGNMME

SEQ ID NO: 2666 - protein, 7 aa, synthetic construct
LANGFME

SEQ ID NO: 2667 - protein, 7 aa, synthetic construct
CEMKVLE

SEQ ID NO: 2668 - protein, 7 aa, synthetic construct
PIRGSIE

SEQ ID NO: 2669 - protein, 7 aa, synthetic construct
VGDVIME

SEQ ID NO: 2670 - protein, 7 aa, synthetic construct
RVVKVVE

SEQ ID NO: 2671 - protein, 7 aa, synthetic construct
ARHGVLE

SEQ ID NO: 2672 - protein, 7 aa, synthetic construct
QQNDVIE

SEQ ID NO: 2673 - protein, 7 aa, synthetic construct
VFVRKGW

SEQ ID NO: 2674 - protein, 7 aa, synthetic construct
KVYGMVV

SEQ ID NO: 2675 - protein, 7 aa, synthetic construct
VAGGLVE

SEQ ID NO: 2676 - protein, 7 aa, synthetic construct
SLSNVIE

SEQ ID NO: 2677 - protein, 7 aa, synthetic construct
AHERFLE

SEQ ID NO: 2678 - protein, 7 aa, synthetic construct
KMDLILE

SEQ ID NO: 2679 - protein, 7 aa, synthetic construct
MLKGLIE

SEQ ID NO: 2680 - protein, 7 aa, synthetic construct
FHDVIIE

SEQ ID NO: 2681 - protein, 7 aa, synthetic construct
NDGRIIE

SEQ ID NO: 2682 - protein, 7 aa, synthetic construct
RSVEIMR

SEQ ID NO: 2683 - protein, 7 aa, synthetic construct
QHRQHLE

SEQ ID NO: 2684 - protein, 7 aa, synthetic construct
VWANSIE

SEQ ID NO: 2685 - protein, 7 aa, synthetic construct
YLRAVLR

SEQ ID NO: 2686 - protein, 7 aa, synthetic construct
LGKVTVE

SEQ ID NO: 2687 - protein, 7 aa, synthetic construct
ALRDVIE

SEQ ID NO: 2688 - protein, 7 aa, synthetic construct
TRDTVIF

SEQ ID NO: 2689 - protein, 7 aa, synthetic construct
EVKVVLE

SEQ ID NO: 2690 - protein, 7 aa, synthetic construct
RGVHLIE

SEQ ID NO: 2691 - protein, 7 aa, synthetic construct
NLSRYWM

SEQ ID NO: 2692 - protein, 7 aa, synthetic construct
PVLTVVE

SEQ ID NO: 2693 - protein, 7 aa, synthetic construct
GRFELIE

SEQ ID NO: 2694 - protein, 7 aa, synthetic construct
LQILVAL

SEQ ID NO: 2695 - protein, 7 aa, synthetic construct
NDRTCIE

SEQ ID NO: 2696 - protein, 7 aa, synthetic construct
GVGMVVD

SEQ ID NO: 2697 - protein, 7 aa, synthetic construct
NRRRILE

SEQ ID NO: 2698 - protein, 7 aa, synthetic construct
RSRWCLE

SEQ ID NO: 2699 - protein, 7 aa, synthetic construct
LEGRVIK

SEQ ID NO: 2700 - protein, 7 aa, synthetic construct
AKGNVVE

SEQ ID NO: 2701 - protein, 7 aa, synthetic construct
YRGSVIE

SEQ ID NO: 2702 - protein, 7 aa, synthetic construct
IVEGVME

SEQ ID NO: 2703 - protein, 7 aa, synthetic construct
ISGMIIE

SEQ ID NO: 2704 - protein, 7 aa, synthetic construct
DPIAILE

SEQ ID NO: 2705 - protein, 7 aa, synthetic construct
LSGVFLE

SEQ ID NO: 2706 - protein, 7 aa, synthetic construct
VTDGILE

SEQ ID NO: 2707 - protein, 7 aa, synthetic construct
IAYKAFE

SEQ ID NO: 2708 - protein, 7 aa, synthetic construct
IARRVLE

SEQ ID NO: 2709 - protein, 7 aa, synthetic construct
MGGIWLE

SEQ ID NO: 2710 - protein, 7 aa, synthetic construct
RAGRVLE

SEQ ID NO: 2711 - protein, 7 aa, synthetic construct
HWVQVLE

SEQ ID NO: 2712 - protein, 7 aa, synthetic construct
SRFVFQM

SEQ ID NO: 2713 - protein, 7 aa, synthetic construct
CMGRYFE

SEQ ID NO: 2714 - protein, 7 aa, synthetic construct
KAVTGVE

SEQ ID NO: 2715 - protein, 7 aa, synthetic construct
NGINYLE

SEQ ID NO: 2716 - protein, 7 aa, synthetic construct
AARDYVG

SEQ ID NO: 2717 - protein, 7 aa, synthetic construct
DSGRALE

SEQ ID NO: 2718 - protein, 7 aa, synthetic construct
TKGVTVE

SEQ ID NO: 2719 - protein, 7 aa, synthetic construct
IGESWME

SEQ ID NO: 2720 - protein, 7 aa, synthetic construct
KGRNMLE

SEQ ID NO: 2721 - protein, 6 aa, synthetic construct
LKRILE

SEQ ID NO: 2722 - protein, 7 aa, synthetic construct
AMHKRME

SEQ ID NO: 2723 - protein, 7 aa, synthetic construct
TTMDVLE

SEQ ID NO: 2724 - protein, 7 aa, synthetic construct
RAVRIIE

SEQ ID NO: 2725 - protein, 7 aa, synthetic construct
TIAGIIE

SEQ ID NO: 2726 - protein, 7 aa, synthetic construct
NRGDWIR

SEQ ID NO: 2727 - protein, 7 aa, synthetic construct
SAHGMLE

SEQ ID NO: 2728 - protein, 7 aa, synthetic construct
NLSKVVE

SEQ ID NO: 2729 - protein, 7 aa, synthetic construct
STMVVLE

SEQ ID NO: 2730 - protein, 6 aa, synthetic construct
VVNIIE

SEQ ID NO: 2731 - protein, 7 aa, synthetic construct
SAGHVVE

SEQ ID NO: 2732 - protein, 7 aa, synthetic construct
RLRRTLE

SEQ ID NO: 2733 - protein, 7 aa, synthetic construct
LDGICTV

SEQ ID NO: 2734 - protein, 7 aa, synthetic construct
TNGLVLE

SEQ ID NO: 2735 - protein, 7 aa, synthetic construct
SGHERIE

SEQ ID NO: 2736 - protein, 7 aa, synthetic construct
RMVGGVE

SEQ ID NO: 2737 - protein, 7 aa, synthetic construct
MGGDIME

SEQ ID NO: 2738 - protein, 7 aa, synthetic construct
LMGNIIE

SEQ ID NO: 2739 - protein, 7 aa, synthetic construct
GTKDVLE

SEQ ID NO: 2740 - protein, 7 aa, synthetic construct
VVALIVE

SEQ ID NO: 2741 - protein, 7 aa, synthetic construct
RLSMRVD

SEQ ID NO: 2742 - protein, 7 aa, synthetic construct
DMPHVVE

SEQ ID NO: 2743 - protein, 7 aa, synthetic construct
VVGTLVD

SEQ ID NO: 2744 - protein, 7 aa, synthetic construct
SMHFTTL

SEQ ID NO: 2745 - protein, 7 aa, synthetic construct
RRATLLE

SEQ ID NO: 2746 - protein, 7 aa, synthetic construct
DRRPVVE

SEQ ID NO: 2747 - protein, 7 aa, synthetic construct
MRARVME

SEQ ID NO: 2748 - protein, 7 aa, synthetic construct
LEGPMIE

SEQ ID NO: 2749 - protein, 7 aa, synthetic construct
RCTGVVE

SEQ ID NO: 2750 - protein, 7 aa, synthetic construct
MGNGVIE

SEQ ID NO: 2751 - protein, 7 aa, synthetic construct
HRSRLVE

SEQ ID NO: 2752 - protein, 7 aa, synthetic construct
ACEAVVE

SEQ ID NO: 2753 - protein, 7 aa, synthetic construct
MVGYIVE

SEQ ID NO: 2754 - protein, 7 aa, synthetic construct
MVVGGFV

SEQ ID NO: 2755 - protein, 7 aa, synthetic construct
IREEILE

SEQ ID NO: 2756 - protein, 7 aa, synthetic construct
NGVRVVE

SEQ ID NO: 2757 - protein, 7 aa, synthetic construct
LTEPKLE

SEQ ID NO: 2758 - protein, 7 aa, synthetic construct
ALVGMMS

SEQ ID NO: 2759 - protein, 7 aa, synthetic construct
RPEHLIE

SEQ ID NO: 2760 - protein, 7 aa, synthetic construct
DRRDYLE

SEQ ID NO: 2761 - protein, 7 aa, synthetic construct
IKVPVIE

SEQ ID NO: 2762 - protein, 7 aa, synthetic construct
IPLSVME

SEQ ID NO: 2763 - protein, 7 aa, synthetic construct
LIGTAIE

SEQ ID NO: 2764 - protein, 7 aa, synthetic construct
MGVNVRF

SEQ ID NO: 2765 - protein, 7 aa, synthetic construct
MSEASVE

SEQ ID NO: 2766 - protein, 7 aa, synthetic construct
VEVVRGV

SEQ ID NO: 2767 - protein, 7 aa, synthetic construct
RSSRRVE

SEQ ID NO: 2768 - protein, 7 aa, synthetic construct
IVGSGIE

SEQ ID NO: 2769 - protein, 7 aa, synthetic construct
ARHLQIE

SEQ ID NO: 2770 - protein, 7 aa, synthetic construct
ESYANSW

SEQ ID NO: 2771 - protein, 7 aa, synthetic construct
ISSRIVE

SEQ ID NO: 2772 - protein, 7 aa, synthetic construct
HQDSPLE

SEQ ID NO: 2773 - protein, 7 aa, synthetic construct
IMLNPVE

SEQ ID NO: 2774 - protein, 7 aa, synthetic construct
RWVDVME

SEQ ID NO: 2775 - protein, 7 aa, synthetic construct
RVIGVLE

SEQ ID NO: 2776 - protein, 7 aa, synthetic construct
SHNKVWW

SEQ ID NO: 2777 - protein, 7 aa, synthetic construct
LTENVME

SEQ ID NO: 2778 - protein, 7 aa, synthetic construct
RFDHLIE

SEQ ID NO: 2779 - protein, 5 aa, synthetic construct
NESIE

SEQ ID NO: 2780 - protein, 7 aa, synthetic construct
RTNRVIE

SEQ ID NO: 2781 - protein, 7 aa, synthetic construct
GSIKNIV

SEQ ID NO: 2782 - protein, 7 aa, synthetic construct
SAEAAIE

SEQ ID NO: 2783 - protein, 7 aa, synthetic construct
LGVTILE

SEQ ID NO: 2784 - protein, 7 aa, synthetic construct
MPHPLLE

SEQ ID NO: 2785 - protein, 7 aa, synthetic construct
IMGFCIE

SEQ ID NO: 2786 - protein, 7 aa, synthetic construct
TRIVFKS

SEQ ID NO: 2787 - protein, 7 aa, synthetic construct
IVGTVLE

SEQ ID NO: 2788 - protein, 7 aa, synthetic construct
RTEEILE

SEQ ID NO: 2789 - protein, 7 aa, synthetic construct
GVIGLIE

SEQ ID NO: 2790 - protein, 7 aa, synthetic construct
GSGRAIE

SEQ ID NO: 2791 - protein, 7 aa, synthetic construct
VHNVWLE

SEQ ID NO: 2792 - protein, 7 aa, synthetic construct
ITGVLME

SEQ ID NO: 2793 - protein, 7 aa, synthetic construct
YGVSWLE

SEQ ID NO: 2794 - protein, 7 aa, synthetic construct
IAAPEHV

SEQ ID NO: 2795 - protein, 7 aa, synthetic construct
GKSFVVE

SEQ ID NO: 2796 - protein, 7 aa, synthetic construct
NVHYLIE

SEQ ID NO: 2797 - protein, 7 aa, synthetic construct
GFGWVME

SEQ ID NO: 2798 - protein, 7 aa, synthetic construct
PAEGALE

SEQ ID NO: 2799 - protein, 7 aa, synthetic construct
QVIVVLE

SEQ ID NO: 2800 - protein, 7 aa, synthetic construct
KCTGCIE

SEQ ID NO: 2801 - protein, 7 aa, synthetic construct
RRFVVLE

SEQ ID NO: 2802 - protein, 7 aa, synthetic construct
VDGPKLE

SEQ ID NO: 2803 - protein, 7 aa, synthetic construct
YMHKPME

SEQ ID NO: 2804 - protein, 7 aa, synthetic construct
LIDLVVE

SEQ ID NO: 2805 - protein, 7 aa, synthetic construct
SIAHMVE

SEQ ID NO: 2806 - protein, 7 aa, synthetic construct
GAQSLVE

SEQ ID NO: 2807 - protein, 7 aa, synthetic construct
DIPYKLE

SEQ ID NO: 2808 - protein, 7 aa, synthetic construct
VTGVVIE

SEQ ID NO: 2809 - protein, 7 aa, synthetic construct
KSDNVME

SEQ ID NO: 2810 - protein, 7 aa, synthetic construct
KSVSVME

SEQ ID NO: 2811 - protein, 7 aa, synthetic construct
VQEISMW

SEQ ID NO: 2812 - protein, 7 aa, synthetic construct
HVLVVME

SEQ ID NO: 2813 - protein, 7 aa, synthetic construct
VITQFLE

SEQ ID NO: 2814 - protein, 7 aa, synthetic construct
EGQMLLE

SEQ ID NO: 2815 - protein, 7 aa, synthetic construct
PQELVVE

SEQ ID NO: 2816 - protein, 7 aa, synthetic construct
SYAKNLE

SEQ ID NO: 2817 - protein, 7 aa, synthetic construct
SSSQHLE

SEQ ID NO: 2818 - protein, 7 aa, synthetic construct
VSHISLE

SEQ ID NO: 2819 - protein, 7 aa, synthetic construct
SVKNSLE

SEQ ID NO: 2820 - protein, 7 aa, synthetic construct
RIWHVLE

SEQ ID NO: 2821 - protein, 7 aa, synthetic construct
RGRDVIE

SEQ ID NO: 2822 - protein, 7 aa, synthetic construct
RPETVIE

SEQ ID NO: 2823 - protein, 7 aa, synthetic construct
YQGAVVE

SEQ ID NO: 2824 - protein, 7 aa, synthetic construct
LLTSREM

SEQ ID NO: 2825 - protein, 7 aa, synthetic construct
LNHGMVE

SEQ ID NO: 2826 - protein, 7 aa, synthetic construct
DKQYVVD

SEQ ID NO: 2827 - protein, 7 aa, synthetic construct
NMSGFLE

SEQ ID NO: 2828 - protein, 7 aa, synthetic construct
QDDFMME

SEQ ID NO: 2829 - protein, 7 aa, synthetic construct
RFLSAIE

SEQ ID NO: 2830 - protein, 7 aa, synthetic construct
RSRIIIE

SEQ ID NO: 2831 - protein, 7 aa, synthetic construct
GDRGFIE

SEQ ID NO: 2832 - protein, 7 aa, synthetic construct
VSGTVLE

SEQ ID NO: 2833 - protein, 7 aa, synthetic construct
KLGDAVE

SEQ ID NO: 2834 - protein, 7 aa, synthetic construct
QVRGIVE

SEQ ID NO: 2835 - protein, 7 aa, synthetic construct
WRTVFQG

SEQ ID NO: 2836 - protein, 7 aa, synthetic construct
VSGVVVE

SEQ ID NO: 2837 - protein, 7 aa, synthetic construct
IGGGSLE

SEQ ID NO: 2838 - protein, 7 aa, synthetic construct
MCSAVIE

SEQ ID NO: 2839 - protein, 7 aa, synthetic construct
EVGCRVE

SEQ ID NO: 2840 - protein, 7 aa, synthetic construct
VVYRILE

SEQ ID NO: 2841 - protein, 7 aa, synthetic construct
RTDACVE

SEQ ID NO: 2842 - protein, 7 aa, synthetic construct
DCRVYVE

SEQ ID NO: 2843 - protein, 7 aa, synthetic construct
RSRPFIE

SEQ ID NO: 2844 - protein, 7 aa, synthetic construct
NALGQME

SEQ ID NO: 2845 - protein, 7 aa, synthetic construct
VSAMIIE

SEQ ID NO: 2846 - protein, 7 aa, synthetic construct
NIGASIE

SEQ ID NO: 2847 - protein, 7 aa, synthetic construct
ALKKPME

SEQ ID NO: 2848 - protein, 7 aa, synthetic construct
EVEGGIE

SEQ ID NO: 2849 - protein, 7 aa, synthetic construct
GGIDLIE

SEQ ID NO: 2850 - protein, 7 aa, synthetic construct
GTEVIWV

SEQ ID NO: 2851 - protein, 7 aa, synthetic construct
NVESMLS

SEQ ID NO: 2852 - protein, 7 aa, synthetic construct
RMFGPIE

SEQ ID NO: 2853 - protein, 7 aa, synthetic construct
VLDQGLE

SEQ ID NO: 2854 - protein, 7 aa, synthetic construct
HLGRVLE

SEQ ID NO: 2855 - protein, 7 aa, synthetic construct
SDDPIVE

SEQ ID NO: 2856 - protein, 7 aa, synthetic construct
PLCKWIE

SEQ ID NO: 2857 - protein, 7 aa, synthetic construct
CMDGVFF

SEQ ID NO: 2858 - protein, 7 aa, synthetic construct
GTPEVVE

SEQ ID NO: 2859 - protein, 7 aa, synthetic construct
LALTVIE

SEQ ID NO: 2860 - protein, 7 aa, synthetic construct
VKGALLE

SEQ ID NO: 2861 - protein, 7 aa, synthetic construct
RDGTTIE

SEQ ID NO: 2862 - protein, 7 aa, synthetic construct
VVGILLE

SEQ ID NO: 2863 - protein, 7 aa, synthetic construct
MDRAPLE

SEQ ID NO: 2864 - protein, 7 aa, synthetic construct
VRSRALE

SEQ ID NO: 2865 - protein, 7 aa, synthetic construct
RRDILIE

SEQ ID NO: 2866 - protein, 7 aa, synthetic construct
PTRGMVN

SEQ ID NO: 2867 - protein, 7 aa, synthetic construct
VVPGGFE

SEQ ID NO: 2868 - protein, 7 aa, synthetic construct
VSLIVIE

SEQ ID NO: 2869 - protein, 7 aa, synthetic construct
RALFLLE

SEQ ID NO: 2870 - protein, 7 aa, synthetic construct
SSAVVVE

SEQ ID NO: 2871 - protein, 7 aa, synthetic construct
LPKYLVE

SEQ ID NO: 2872 - protein, 7 aa, synthetic construct
IGVIYIE

SEQ ID NO: 2873 - protein, 6 aa, synthetic construct
CATVLE

SEQ ID NO: 2874 - protein, 7 aa, synthetic construct
YFVITIE

SEQ ID NO: 2875 - protein, 7 aa, synthetic construct
RCSVVVI

SEQ ID NO: 2876 - protein, 7 aa, synthetic construct
VRLVFCE

SEQ ID NO: 2877 - protein, 7 aa, synthetic construct
HLSGAIE

SEQ ID NO: 2878 - protein, 7 aa, synthetic construct
SWARLRD

SEQ ID NO: 2879 - protein, 7 aa, synthetic construct
IQVTVME

SEQ ID NO: 2880 - protein, 7 aa, synthetic construct
ISGHVMY

SEQ ID NO: 2881 - protein, 7 aa, synthetic construct
GSWGLIE

SEQ ID NO: 2882 - protein, 7 aa, synthetic construct
MSPGLME

SEQ ID NO: 2883 - protein, 7 aa, synthetic construct
ELMRIIE

SEQ ID NO: 2884 - protein, 7 aa, synthetic construct
RSNGLVE

SEQ ID NO: 2885 - protein, 7 aa, synthetic construct
TNVLVIE

SEQ ID NO: 2886 - protein, 7 aa, synthetic construct
HLNAVLE

SEQ ID NO: 2887 - protein, 7 aa, synthetic construct
NIVTVIE

SEQ ID NO: 2888 - protein, 7 aa, synthetic construct
DIDKVLE

SEQ ID NO: 2889 - protein, 7 aa, synthetic construct
ISAVVRW

SEQ ID NO: 2890 - protein, 7 aa, synthetic construct
SVAYAIE

SEQ ID NO: 2891 - protein, 7 aa, synthetic construct
VLECVLE

SEQ ID NO: 2892 - protein, 7 aa, synthetic construct
TDRVALE

SEQ ID NO: 2893 - protein, 7 aa, synthetic construct
NVRRHVE

SEQ ID NO: 2894 - protein, 7 aa, synthetic construct
PWVNAIE

SEQ ID NO: 2895 - protein, 7 aa, synthetic construct
LRDWVIE

SEQ ID NO: 2896 - protein, 7 aa, synthetic construct
IGDPIVE

SEQ ID NO: 2897 - protein, 7 aa, synthetic construct
GMVCALE

SEQ ID NO: 2898 - protein, 7 aa, synthetic construct
RIRMMIE

SEQ ID NO: 2899 - protein, 7 aa, synthetic construct
PIVSPLE

SEQ ID NO: 2900 - protein, 7 aa, synthetic construct
RHDLRFW

SEQ ID NO: 2901 - protein, 7 aa, synthetic construct
LPGLKME

SEQ ID NO: 2902 - protein, 7 aa, synthetic construct
RDMRYLM

SEQ ID NO: 2903 - protein, 7 aa, synthetic construct
LSENALE

SEQ ID NO: 2904 - protein, 7 aa, synthetic construct
PHRILAR

SEQ ID NO: 2905 - protein, 7 aa, synthetic construct
RIGYALL

SEQ ID NO: 2906 - protein, 7 aa, synthetic construct
RPREVLE

SEQ ID NO: 2907 - protein, 7 aa, synthetic construct
LGRNLME

SEQ ID NO: 2908 - protein, 7 aa, synthetic construct
LSGKVIE

SEQ ID NO: 2909 - protein, 7 aa, synthetic construct
VRATPLE

SEQ ID NO: 2910 - protein, 7 aa, synthetic construct
EKGYILE

SEQ ID NO: 2911 - protein, 7 aa, synthetic construct
RNGWWVE

SEQ ID NO: 2912 - protein, 7 aa, synthetic construct
VLQDVLE

SEQ ID NO: 2913 - protein, 7 aa, synthetic construct
RIGRIVE

SEQ ID NO: 2914 - protein, 7 aa, synthetic construct
GRIVFTV

SEQ ID NO: 2915 - protein, 7 aa, synthetic construct
CVRSWVE

SEQ ID NO: 2916 - protein, 7 aa, synthetic construct
VMHIVLE

SEQ ID NO: 2917 - protein, 7 aa, synthetic construct
HQQAPIE

SEQ ID NO: 2918 - protein, 7 aa, synthetic construct
LLRLAGA

SEQ ID NO: 2919 - protein, 7 aa, synthetic construct
IGLLLLE

SEQ ID NO: 2920 - protein, 7 aa, synthetic construct
ELRTAVE

SEQ ID NO: 2921 - protein, 7 aa, synthetic construct
VRADQME

SEQ ID NO: 2922 - protein, 7 aa, synthetic construct
NMMRVIE

SEQ ID NO: 2923 - protein, 7 aa, synthetic construct
SSHSMIG

SEQ ID NO: 2924 - protein, 7 aa, synthetic construct
IFTPMIE

SEQ ID NO: 2925 - protein, 7 aa, synthetic construct
NVSVVIE

SEQ ID NO: 2926 - protein, 7 aa, synthetic construct
KMRSRVE

SEQ ID NO: 2927 - protein, 7 aa, synthetic construct
NCNVVVE

SEQ ID NO: 2928 - protein, 7 aa, synthetic construct
QKMEYVE

SEQ ID NO: 2929 - protein, 7 aa, synthetic construct
LKESALE

SEQ ID NO: 2930 - protein, 7 aa, synthetic construct
LCSVVVE

SEQ ID NO: 2931 - protein, 7 aa, synthetic construct
FMFVFVD

SEQ ID NO: 2932 - protein, 7 aa, synthetic construct
IRGFYLE

SEQ ID NO: 2933 - protein, 7 aa, synthetic construct
KNEGGLE

SEQ ID NO: 2934 - protein, 7 aa, synthetic construct
TQIVLIE

SEQ ID NO: 2935 - protein, 7 aa, synthetic construct
RMRDLLE

SEQ ID NO: 2936 - protein, 7 aa, synthetic construct
PVTDFIE

SEQ ID NO: 2937 - protein, 7 aa, synthetic construct
DLHDYIE

SEQ ID NO: 2938 - protein, 7 aa, synthetic construct
MTGVGIE

SEQ ID NO: 2939 - protein, 7 aa, synthetic construct
VRDIALE

SEQ ID NO: 2940 - protein, 7 aa, synthetic construct
HVNSVLE

SEQ ID NO: 2941 - protein, 7 aa, synthetic construct
GVLTIMI

SEQ ID NO: 2942 - protein, 7 aa, synthetic construct
EVAFTIE

SEQ ID NO: 2943 - protein, 7 aa, synthetic construct
VDGHIME

SEQ ID NO: 2944 - protein, 7 aa, synthetic construct
RIVVIVE

SEQ ID NO: 2945 - protein, 7 aa, synthetic construct
IGPVVME

SEQ ID NO: 2946 - protein, 7 aa, synthetic construct
PVVTNGR

SEQ ID NO: 2947 - protein, 7 aa, synthetic construct
DLRTGVE

SEQ ID NO: 2948 - protein, 7 aa, synthetic construct
VRWIVLE

SEQ ID NO: 2949 - protein, 7 aa, synthetic construct
ISGYALE

SEQ ID NO: 2950 - protein, 7 aa, synthetic construct
LGSTVLE

SEQ ID NO: 2951 - protein, 7 aa, synthetic construct
TLDAILE

SEQ ID NO: 2952 - protein, 7 aa, synthetic construct
ALHMSVE

SEQ ID NO: 2953 - protein, 7 aa, synthetic construct
CIGQVLE

SEQ ID NO: 2954 - protein, 7 aa, synthetic construct
VRVVFMD

SEQ ID NO: 2955 - protein, 7 aa, synthetic construct
HIRTRVE

SEQ ID NO: 2956 - protein, 7 aa, synthetic construct
QLYTTIE

SEQ ID NO: 2957 - protein, 7 aa, synthetic construct
SVASTLE

SEQ ID NO: 2958 - protein, 7 aa, synthetic construct
TLHYMIE

SEQ ID NO: 2959 - protein, 7 aa, synthetic construct
GPVGVVE

SEQ ID NO: 2960 - protein, 7 aa, synthetic construct
GHDGICF

SEQ ID NO: 2961 - protein, 7 aa, synthetic construct
KKSPLIE

SEQ ID NO: 2962 - protein, 7 aa, synthetic construct
DGGDRLE

SEQ ID NO: 2963 - protein, 7 aa, synthetic construct
RDVDLIE

SEQ ID NO: 2964 - protein, 7 aa, synthetic construct
LQGLALE

SEQ ID NO: 2965 - protein, 7 aa, synthetic construct
NMDCVVE

SEQ ID NO: 2966 - protein, 7 aa, synthetic construct
LAFGSVE

SEQ ID NO: 2967 - protein, 7 aa, synthetic construct
VIDELIE

SEQ ID NO: 2968 - protein, 7 aa, synthetic construct
VMAQVVE

SEQ ID NO: 2969 - protein, 7 aa, synthetic construct
LMIPVLE

SEQ ID NO: 2970 - protein, 7 aa, synthetic construct
LLQGLIE

SEQ ID NO: 2971 - protein, 6 aa, synthetic construct
TQDCVE

SEQ ID NO: 2972 - protein, 7 aa, synthetic construct
YANARIE

SEQ ID NO: 2973 - protein, 7 aa, synthetic construct
NLRDGIE

SEQ ID NO: 2974 - protein, 7 aa, synthetic construct
SYVGSDW

SEQ ID NO: 2975 - protein, 7 aa, synthetic construct
VVAVVME

SEQ ID NO: 2976 - protein, 7 aa, synthetic construct
VYRRIWR

SEQ ID NO: 2977 - protein, 7 aa, synthetic construct
MVKRVLE

SEQ ID NO: 2978 - protein, 7 aa, synthetic construct
RRDYLLE

SEQ ID NO: 2979 - protein, 7 aa, synthetic construct
TILVNME

SEQ ID NO: 2980 - protein, 7 aa, synthetic construct
LVVRRFV

SEQ ID NO: 2981 - protein, 7 aa, synthetic construct
NKQKMLE

SEQ ID NO: 2982 - protein, 7 aa, synthetic construct
KACRIVE

SEQ ID NO: 2983 - protein, 7 aa, synthetic construct
IMDRVVE

SEQ ID NO: 2984 - protein, 7 aa, synthetic construct
LVWTVIE

SEQ ID NO: 2985 - protein, 7 aa, synthetic construct
RNEGTLE

SEQ ID NO: 2986 - protein, 7 aa, synthetic construct
RRRSNLE

SEQ ID NO: 2987 - protein, 7 aa, synthetic construct
VEKGIME

SEQ ID NO: 2988 - protein, 7 aa, synthetic construct
IIQCVME

SEQ ID NO: 2989 - protein, 7 aa, synthetic construct
KWVFVIE

SEQ ID NO: 2990 - protein, 7 aa, synthetic construct
MVGNVVE

SEQ ID NO: 2991 - protein, 7 aa, synthetic construct
DVPGVIE

SEQ ID NO: 2992 - protein, 7 aa, synthetic construct
SWKKMAV

SEQ ID NO: 2993 - protein, 7 aa, synthetic construct
YNRSIIE

SEQ ID NO: 2994 - protein, 7 aa, synthetic construct
NRSIILE

SEQ ID NO: 2995 - protein, 7 aa, synthetic construct
VKGIVVE

SEQ ID NO: 2996 - protein, 7 aa, synthetic construct
RAGKLME

SEQ ID NO: 2997 - protein, 6 aa, synthetic construct
RNRFLE

SEQ ID NO: 2998 - protein, 7 aa, synthetic construct
RLGLVIE

SEQ ID NO: 2999 - protein, 7 aa, synthetic construct
LSQMVEV

SEQ ID NO: 3000 - protein, 7 aa, synthetic construct
REGVILE

SEQ ID NO: 3001 - protein, 7 aa, synthetic construct
RSGPWLE

SEQ ID NO: 3002 - protein, 7 aa, synthetic construct
PVGQNDV

SEQ ID NO: 3003 - protein, 7 aa, synthetic construct
EMGHVLE

SEQ ID NO: 3004 - protein, 7 aa, synthetic construct
KKLGLIE

SEQ ID NO: 3005 - protein, 7 aa, synthetic construct
KIEIALE

SEQ ID NO: 3006 - protein, 7 aa, synthetic construct
MMALAME

SEQ ID NO: 3007 - protein, 7 aa, synthetic construct
GMHNVVE

SEQ ID NO: 3008 - protein, 7 aa, synthetic construct
VGSFLVE

SEQ ID NO: 3009 - protein, 7 aa, synthetic construct
QVIRKVE

SEQ ID NO: 3010 - protein, 7 aa, synthetic construct
VTHRLLE

SEQ ID NO: 3011 - protein, 7 aa, synthetic construct
PMGNVVE

SEQ ID NO: 3012 - protein, 7 aa, synthetic construct
LMEGVLE

SEQ ID NO: 3013 - protein, 7 aa, synthetic construct
ISGRGIE

SEQ ID NO: 3014 - protein, 7 aa, synthetic construct
PCAQRIG

SEQ ID NO: 3015 - protein, 7 aa, synthetic construct
VPEVVME

SEQ ID NO: 3016 - protein, 7 aa, synthetic construct
RSRSLIE

SEQ ID NO: 3017 - protein, 7 aa, synthetic construct
KTNSTLE

SEQ ID NO: 3018 - protein, 7 aa, synthetic construct
GLTAILE

SEQ ID NO: 3019 - protein, 7 aa, synthetic construct
GIKSWIE

SEQ ID NO: 3020 - protein, 7 aa, synthetic construct
DYPSMLE

SEQ ID NO: 3021 - protein, 7 aa, synthetic construct
FSGDHVE

SEQ ID NO: 3022 - protein, 7 aa, synthetic construct
MPGGLVE

SEQ ID NO: 3023 - protein, 7 aa, synthetic construct
IRGSVLE

SEQ ID NO: 3024 - protein, 7 aa, synthetic construct
RMYVLLS

SEQ ID NO: 3025 - protein, 7 aa, synthetic construct
RKVHIVE

SEQ ID NO: 3026 - protein, 7 aa, synthetic construct
PVHSAME

SEQ ID NO: 3027 - protein, 7 aa, synthetic construct
LIRGWME

SEQ ID NO: 3028 - protein, 7 aa, synthetic construct
SAERGLE

SEQ ID NO: 3029 - protein, 7 aa, synthetic construct
QKDSYIE

SEQ ID NO: 3030 - protein, 7 aa, synthetic construct
VHKRMIE

SEQ ID NO: 3031 - protein, 7 aa, synthetic construct
QVKAMVE

SEQ ID NO: 3032 - protein, 7 aa, synthetic construct
GLYVVLE

SEQ ID NO: 3033 - protein, 7 aa, synthetic construct
NTDNSLE

SEQ ID NO: 3034 - protein, 7 aa, synthetic construct
MLSKVME

SEQ ID NO: 3035 - protein, 7 aa, synthetic construct
KVKRVVE

SEQ ID NO: 3036 - protein, 7 aa, synthetic construct
MPCVVLE

SEQ ID NO: 3037 - protein, 7 aa, synthetic construct
ACLGLLE

SEQ ID NO: 3038 - protein, 7 aa, synthetic construct
NDTRMLE

SEQ ID NO: 3039 - protein, 7 aa, synthetic construct
SKLRVIE

SEQ ID NO: 3040 - protein, 7 aa, synthetic construct
MTANVIE

SEQ ID NO: 3041 - protein, 7 aa, synthetic construct
SIRVGSV

SEQ ID NO: 3042 - protein, 7 aa, synthetic construct
MVGDRVD

SEQ ID NO: 3043 - protein, 7 aa, synthetic construct
WWWNMID

SEQ ID NO: 3044 - protein, 7 aa, synthetic construct
SMLHVLE

SEQ ID NO: 3045 - protein, 7 aa, synthetic construct
ILGLVME

SEQ ID NO: 3046 - protein, 7 aa, synthetic construct
GAFRTVE

SEQ ID NO: 3047 - protein, 7 aa, synthetic construct
KGRDAWS

SEQ ID NO: 3048 - protein, 7 aa, synthetic construct
REDMLVE

SEQ ID NO: 3049 - protein, 7 aa, synthetic construct
SSVGVME

SEQ ID NO: 3050 - protein, 7 aa, synthetic construct
DYRLAIE

SEQ ID NO: 3051 - protein, 7 aa, synthetic construct
SKVAIIE

SEQ ID NO: 3052 - protein, 7 aa, synthetic construct
EFDTVLE

SEQ ID NO: 3053 - protein, 7 aa, synthetic construct
FNRHMVE

SEQ ID NO: 3054 - protein, 7 aa, synthetic construct
DVRWIME

SEQ ID NO: 3055 - protein, 7 aa, synthetic construct
GLSVWLE

SEQ ID NO: 3056 - protein, 7 aa, synthetic construct
IMWLVLE

SEQ ID NO: 3057 - protein, 7 aa, synthetic construct
ISGAIIE

SEQ ID NO: 3058 - protein, 7 aa, synthetic construct
DPGMAIE

SEQ ID NO: 3059 - protein, 7 aa, synthetic construct
QLASAIE

SEQ ID NO: 3060 - protein, 7 aa, synthetic construct
SLMVVME

SEQ ID NO: 3061 - protein, 7 aa, synthetic construct
DIRLWIE

SEQ ID NO: 3062 - protein, 7 aa, synthetic construct
PVQSMME

SEQ ID NO: 3063 - protein, 7 aa, synthetic construct
NITGGLE

SEQ ID NO: 3064 - protein, 7 aa, synthetic construct
MAATILE

SEQ ID NO: 3065 - protein, 7 aa, synthetic construct
MRMVFMS

SEQ ID NO: 3066 - protein, 7 aa, synthetic construct
KQRVRVE

SEQ ID NO: 3067 - protein, 7 aa, synthetic construct
RRMVFTG

SEQ ID NO: 3068 - protein, 7 aa, synthetic construct
NKASNIE

SEQ ID NO: 3069 - protein, 7 aa, synthetic construct
KRRVFME

SEQ ID NO: 3070 - protein, 7 aa, synthetic construct
LADSYLE

SEQ ID NO: 3071 - protein, 7 aa, synthetic construct
ETRQRVE

SEQ ID NO: 3072 - protein, 7 aa, synthetic construct
NVRSVLE

SEQ ID NO: 3073 - protein, 7 aa, synthetic construct
HIRAIVE

SEQ ID NO: 3074 - protein, 7 aa, synthetic construct
EGTHFIE

SEQ ID NO: 3075 - protein, 7 aa, synthetic construct
HTGDVMI

SEQ ID NO: 3076 - protein, 7 aa, synthetic construct
KIDGGME

SEQ ID NO: 3077 - protein, 7 aa, synthetic construct
TRVHILE

SEQ ID NO: 3078 - protein, 7 aa, synthetic construct
RDEDYVI

SEQ ID NO: 3079 - protein, 7 aa, synthetic construct
GKHQMIE

SEQ ID NO: 3080 - protein, 7 aa, synthetic construct
MGRCLIE

SEQ ID NO: 3081 - protein, 7 aa, synthetic construct
LRGGYIE

SEQ ID NO: 3082 - protein, 7 aa, synthetic construct
VVDSLME

SEQ ID NO: 3083 - protein, 7 aa, synthetic construct
PGDMIVD

SEQ ID NO: 3084 - protein, 7 aa, synthetic construct
KEIRPVE

SEQ ID NO: 3085 - protein, 7 aa, synthetic construct
HRALLVE

SEQ ID NO: 3086 - protein, 7 aa, synthetic construct
RLVVVYA

SEQ ID NO: 3087 - protein, 7 aa, synthetic construct
GMLGALE

SEQ ID NO: 3088 - protein, 7 aa, synthetic construct
NLHFVVE

SEQ ID NO: 3089 - protein, 7 aa, synthetic construct
RLRLVVE

SEQ ID NO: 3090 - protein, 7 aa, synthetic construct
HIINAME

SEQ ID NO: 3091 - protein, 7 aa, synthetic construct
MGGDMVE

SEQ ID NO: 3092 - protein, 7 aa, synthetic construct
MLRTAIE

SEQ ID NO: 3093 - protein, 7 aa, synthetic construct
RARKVLE

SEQ ID NO: 3094 - protein, 7 aa, synthetic construct
ILGMVIE

SEQ ID NO: 3095 - protein, 7 aa, synthetic construct
LIGMAFE

SEQ ID NO: 3096 - protein, 7 aa, synthetic construct
RSGLPLE

SEQ ID NO: 3097 - protein, 7 aa, synthetic construct
HKEVIVE

SEQ ID NO: 3098 - protein, 7 aa, synthetic construct
HGLMRVE

SEQ ID NO: 3099 - protein, 7 aa, synthetic construct
FGMDDAV

SEQ ID NO: 3100 - protein, 7 aa, synthetic construct
TTKILVE

SEQ ID NO: 3101 - protein, 7 aa, synthetic construct
IRDGVME

SEQ ID NO: 3102 - protein, 7 aa, synthetic construct
DVTNIIE

SEQ ID NO: 3103 - protein, 7 aa, synthetic construct
NILAVVE

SEQ ID NO: 3104 - protein, 7 aa, synthetic construct
HGWVPVE

SEQ ID NO: 3105 - protein, 7 aa, synthetic construct
TSAIVLE

SEQ ID NO: 3106 - protein, 7 aa, synthetic construct
MVGGMIE

SEQ ID NO: 3107 - protein, 7 aa, synthetic construct
ELANVME

SEQ ID NO: 3108 - protein, 7 aa, synthetic construct
NPRGVIE

SEQ ID NO: 3109 - protein, 7 aa, synthetic construct
KIRYVLE

SEQ ID NO: 3110 - protein, 7 aa, synthetic construct
LIGTVIE

SEQ ID NO: 3111 - protein, 7 aa, synthetic construct
NTSQTIE

SEQ ID NO: 3112 - protein, 7 aa, synthetic construct
GHRDCIA

SEQ ID NO: 3113 - protein, 7 aa, synthetic construct
KSLVVLE

SEQ ID NO: 3114 - protein, 7 aa, synthetic construct
NFAGMLE

SEQ ID NO: 3115 - protein, 7 aa, synthetic construct
VINNPIA

SEQ ID NO: 3116 - protein, 7 aa, synthetic construct
AKVMVVE

SEQ ID NO: 3117 - protein, 7 aa, synthetic construct
DIMGCME

SEQ ID NO: 3118 - protein, 7 aa, synthetic construct
MATTTLE

SEQ ID NO: 3119 - protein, 7 aa, synthetic construct
FTQGMIE

SEQ ID NO: 3120 - protein, 7 aa, synthetic construct
HVRNLVS

SEQ ID NO: 3121 - protein, 7 aa, synthetic construct
NKGMVIE

SEQ ID NO: 3122 - protein, 7 aa, synthetic construct
VGGQVVE

SEQ ID NO: 3123 - protein, 7 aa, synthetic construct
YFGKVIE

SEQ ID NO: 3124 - protein, 7 aa, synthetic construct
WKPSVVE

SEQ ID NO: 3125 - protein, 7 aa, synthetic construct
MFGRCLE

SEQ ID NO: 3126 - protein, 7 aa, synthetic construct
MVMDILE

SEQ ID NO: 3127 - protein, 6 aa, synthetic construct
TWWVME

SEQ ID NO: 3128 - protein, 7 aa, synthetic construct
TGSVVRI

SEQ ID NO: 3129 - protein, 7 aa, synthetic construct
SNGVMLE

SEQ ID NO: 3130 - protein, 7 aa, synthetic construct
TYQVIME

SEQ ID NO: 3131 - protein, 7 aa, synthetic construct
ARSVTIE

SEQ ID NO: 3132 - protein, 7 aa, synthetic construct
VFSRVLE

SEQ ID NO: 3133 - protein, 7 aa, synthetic construct
TVTFVME

SEQ ID NO: 3134 - protein, 7 aa, synthetic construct
RMETVIE

SEQ ID NO: 3135 - protein, 4 aa, synthetic construct
TYIE

SEQ ID NO: 3136 - protein, 7 aa, synthetic construct
QHEFNVE

SEQ ID NO: 3137 - protein, 7 aa, synthetic construct
NHARVLE

SEQ ID NO: 3138 - protein, 7 aa, synthetic construct
LGVKMIE

SEQ ID NO: 3139 - protein, 7 aa, synthetic construct
GGGTLVE

SEQ ID NO: 3140 - protein, 7 aa, synthetic construct
RARELIE

SEQ ID NO: 3141 - protein, 7 aa, synthetic construct
FVDSAIE

SEQ ID NO: 3142 - protein, 7 aa, synthetic construct
MGKEFLE

SEQ ID NO: 3143 - protein, 7 aa, synthetic construct
CVEHKIE

SEQ ID NO: 3144 - protein, 7 aa, synthetic construct
MFERVLE

SEQ ID NO: 3145 - protein, 7 aa, synthetic construct
VVKRLLE

SEQ ID NO: 3146 - protein, 7 aa, synthetic construct
QDGKVVE

SEQ ID NO: 3147 - protein, 7 aa, synthetic construct
TNQDQVE

SEQ ID NO: 3148 - protein, 7 aa, synthetic construct
AIGCVID

SEQ ID NO: 3149 - protein, 7 aa, synthetic construct
NYINVVE

SEQ ID NO: 3150 - protein, 7 aa, synthetic construct
DRAQGVE

SEQ ID NO: 3151 - protein, 7 aa, synthetic construct
VVGVKLE

SEQ ID NO: 3152 - protein, 7 aa, synthetic construct
LPRSIME

SEQ ID NO: 3153 - protein, 7 aa, synthetic construct
GRSIIVE

SEQ ID NO: 3154 - protein, 7 aa, synthetic construct
GSGFVLE

SEQ ID NO: 3155 - protein, 7 aa, synthetic construct
VGGDWLE

SEQ ID NO: 3156 - protein, 7 aa, synthetic construct
VVHGVIE

SEQ ID NO: 3157 - protein, 7 aa, synthetic construct
PMLFVLE

SEQ ID NO: 3158 - protein, 7 aa, synthetic construct
KRERAME

SEQ ID NO: 3159 - protein, 7 aa, synthetic construct
CVNGFIE

SEQ ID NO: 3160 - protein, 7 aa, synthetic construct
PILCIIE

SEQ ID NO: 3161 - protein, 7 aa, synthetic construct
TMREFLE

SEQ ID NO: 3162 - protein, 7 aa, synthetic construct
REDHRLD

SEQ ID NO: 3163 - protein, 7 aa, synthetic construct
CIGLVLE

SEQ ID NO: 3164 - protein, 7 aa, synthetic construct
LGLDVLE

SEQ ID NO: 3165 - protein, 7 aa, synthetic construct
VPGSKLE

SEQ ID NO: 3166 - protein, 7 aa, synthetic construct
DNVIVLE

SEQ ID NO: 3167 - protein, 7 aa, synthetic construct
HYSTMLE

SEQ ID NO: 3168 - protein, 7 aa, synthetic construct
RVRGGLE

SEQ ID NO: 3169 - protein, 7 aa, synthetic construct
IWGRVLE

SEQ ID NO: 3170 - protein, 7 aa, synthetic construct
HSSMVIE

SEQ ID NO: 3171 - protein, 7 aa, synthetic construct
GRFGNLE

SEQ ID NO: 3172 - protein, 7 aa, synthetic construct
NVTGVIE

SEQ ID NO: 3173 - protein, 7 aa, synthetic construct
NVRGVIE

SEQ ID NO: 3174 - protein, 7 aa, synthetic construct
MSARWIE

SEQ ID NO: 3175 - protein, 7 aa, synthetic construct
CRMVVVE

SEQ ID NO: 3176 - protein, 7 aa, synthetic construct
GMDTVIG

SEQ ID NO: 3177 - protein, 7 aa, synthetic construct
KGMIFHR

SEQ ID NO: 3178 - protein, 7 aa, synthetic construct
VLRFPVE

SEQ ID NO: 3179 - protein, 7 aa, synthetic construct
MGNKILE

SEQ ID NO: 3180 - protein, 7 aa, synthetic construct
PVNDVIE

SEQ ID NO: 3181 - protein, 7 aa, synthetic construct
HRNINIE

SEQ ID NO: 3182 - protein, 7 aa, synthetic construct
SRTRMLE

SEQ ID NO: 3183 - protein, 7 aa, synthetic construct
IEWRIIE

SEQ ID NO: 3184 - protein, 7 aa, synthetic construct
GLWFRLE

SEQ ID NO: 3185 - protein, 7 aa, synthetic construct
DMLVFRS

SEQ ID NO: 3186 - protein, 7 aa, synthetic construct
IVVPALE

SEQ ID NO: 3187 - protein, 7 aa, synthetic construct
IAGTELE

SEQ ID NO: 3188 - protein, 7 aa, synthetic construct
DAVVRLE

SEQ ID NO: 3189 - protein, 7 aa, synthetic construct
RVVDAIE

SEQ ID NO: 3190 - protein, 7 aa, synthetic construct
VSARVFL

SEQ ID NO: 3191 - protein, 7 aa, synthetic construct
LTRPIVD

SEQ ID NO: 3192 - protein, 5 aa, synthetic construct
LRILE

SEQ ID NO: 3193 - protein, 7 aa, synthetic construct
DPDSVLE

SEQ ID NO: 3194 - protein, 7 aa, synthetic construct
DGRAALG

SEQ ID NO: 3195 - protein, 7 aa, synthetic construct
RRTRVIE

SEQ ID NO: 3196 - protein, 7 aa, synthetic construct
NRRTLIE

SEQ ID NO: 3197 - protein, 7 aa, synthetic construct
SGNGGLE

SEQ ID NO: 3198 - protein, 7 aa, synthetic construct
IISRPLE

SEQ ID NO: 3199 - protein, 7 aa, synthetic construct
MGSMIVR

SEQ ID NO: 3200 - protein, 7 aa, synthetic construct
KVGAFLE

SEQ ID NO: 3201 - protein, 7 aa, synthetic construct
DVIGMME

SEQ ID NO: 3202 - protein, 7 aa, synthetic construct
VTVGLLA

SEQ ID NO: 3203 - protein, 7 aa, synthetic construct
NLRGWLE

SEQ ID NO: 3204 - protein, 7 aa, synthetic construct
ESAKYLE

SEQ ID NO: 3205 - protein, 7 aa, synthetic construct
PLMSILE

SEQ ID NO: 3206 - protein, 7 aa, synthetic construct
SVRDALE

SEQ ID NO: 3207 - protein, 7 aa, synthetic construct
KLRRIME

SEQ ID NO: 3208 - protein, 7 aa, synthetic construct
NVRGMLE

SEQ ID NO: 3209 - protein, 7 aa, synthetic construct
SVGVVLE

SEQ ID NO: 3210 - protein, 7 aa, synthetic construct
SGGKYVE

SEQ ID NO: 3211 - protein, 7 aa, synthetic construct
MQARVIE

SEQ ID NO: 3212 - protein, 7 aa, synthetic construct
FTSVLTV

SEQ ID NO: 3213 - protein, 7 aa, synthetic construct
LPNGVLE

SEQ ID NO: 3214 - protein, 7 aa, synthetic construct
LDATQIE

SEQ ID NO: 3215 - protein, 7 aa, synthetic construct
LPDVVIE

SEQ ID NO: 3216 - protein, 7 aa, synthetic construct
DAGMLLE

SEQ ID NO: 3217 - protein, 7 aa, synthetic construct
VGGIILE

SEQ ID NO: 3218 - protein, 7 aa, synthetic construct
ICVGWWA

SEQ ID NO: 3219 - protein, 7 aa, synthetic construct
CTHKVVE

SEQ ID NO: 3220 - protein, 7 aa, synthetic construct
IASKIVE

SEQ ID NO: 3221 - protein, 7 aa, synthetic construct
AWLSVIE

SEQ ID NO: 3222 - protein, 7 aa, synthetic construct
GVGELIE

SEQ ID NO: 3223 - protein, 7 aa, synthetic construct
GHNDLIE

SEQ ID NO: 3224 - protein, 7 aa, synthetic construct
KEGLTIE

SEQ ID NO: 3225 - protein, 7 aa, synthetic construct
VEGVLVE

SEQ ID NO: 3226 - protein, 7 aa, synthetic construct
DKTTVVI

SEQ ID NO: 3227 - protein, 7 aa, synthetic construct
RKRVIVE

SEQ ID NO: 3228 - protein, 7 aa, synthetic construct
DCGWIVE

SEQ ID NO: 3229 - protein, 7 aa, synthetic construct
AGCYLIR

SEQ ID NO: 3230 - protein, 7 aa, synthetic construct
DVRIVIE

SEQ ID NO: 3231 - protein, 7 aa, synthetic construct
SVVGMVE

SEQ ID NO: 3232 - protein, 7 aa, synthetic construct
TAWVIME

SEQ ID NO: 3233 - protein, 7 aa, synthetic construct
NRVVFRL

SEQ ID NO: 3234 - protein, 7 aa, synthetic construct
PRPYILE

SEQ ID NO: 3235 - protein, 7 aa, synthetic construct
NLPAVIE

SEQ ID NO: 3236 - protein, 7 aa, synthetic construct
RNCLFLE

SEQ ID NO: 3237 - protein, 7 aa, synthetic construct
RMAWVLG

SEQ ID NO: 3238 - protein, 7 aa, synthetic construct
DRETIVE

SEQ ID NO: 3239 - protein, 7 aa, synthetic construct
RMTDSPG

SEQ ID NO: 3240 - protein, 7 aa, synthetic construct
TGNMMMS

SEQ ID NO: 3241 - protein, 7 aa, synthetic construct
GPVELVE

SEQ ID NO: 3242 - protein, 6 aa, synthetic construct
NCSILE

SEQ ID NO: 3243 - protein, 7 aa, synthetic construct
FNNFLLE

SEQ ID NO: 3244 - protein, 7 aa, synthetic construct
ASETMVD

SEQ ID NO: 3245 - protein, 7 aa, synthetic construct
PRLVVVD

SEQ ID NO: 3246 - protein, 7 aa, synthetic construct
EHGYVLE

SEQ ID NO: 3247 - protein, 7 aa, synthetic construct
VVRCALE

SEQ ID NO: 3248 - protein, 7 aa, synthetic construct
NGEGAVE

SEQ ID NO: 3249 - protein, 7 aa, synthetic construct
LMWVEGQ

SEQ ID NO: 3250 - protein, 7 aa, synthetic construct
VVENVME

SEQ ID NO: 3251 - protein, 7 aa, synthetic construct
FNHVFLE

SEQ ID NO: 3252 - protein, 7 aa, synthetic construct
EGNVTIE

SEQ ID NO: 3253 - protein, 7 aa, synthetic construct
LGPLIIE

SEQ ID NO: 3254 - protein, 7 aa, synthetic construct
SVLRLVR

SEQ ID NO: 3255 - protein, 7 aa, synthetic construct
PIEREDV

SEQ ID NO: 3256 - protein, 6 aa, synthetic construct
GTGILE

SEQ ID NO: 3257 - protein, 7 aa, synthetic construct
LGEGGVE

SEQ ID NO: 3258 - protein, 7 aa, synthetic construct
NTVTVME

SEQ ID NO: 3259 - protein, 7 aa, synthetic construct
SGSAVIE

SEQ ID NO: 3260 - protein, 7 aa, synthetic construct
KVKMLIE

SEQ ID NO: 3261 - protein, 7 aa, synthetic construct
HNTVFME

SEQ ID NO: 3262 - protein, 7 aa, synthetic construct
GVGGTIE

SEQ ID NO: 3263 - protein, 7 aa, synthetic construct
NNSARIE

SEQ ID NO: 3264 - protein, 7 aa, synthetic construct
IDEGIVE

SEQ ID NO: 3265 - protein, 7 aa, synthetic construct
DVNDWME

SEQ ID NO: 3266 - protein, 7 aa, synthetic construct
GIAIMIE

SEQ ID NO: 3267 - protein, 7 aa, synthetic construct
NAVMALE

SEQ ID NO: 3268 - protein, 7 aa, synthetic construct
RVVSWME

SEQ ID NO: 3269 - protein, 7 aa, synthetic construct
INSVGIE

SEQ ID NO: 3270 - protein, 7 aa, synthetic construct
PSAEIAI

SEQ ID NO: 3271 - protein, 7 aa, synthetic construct
DHIILVE

SEQ ID NO: 3272 - protein, 7 aa, synthetic construct
CRETYIE

SEQ ID NO: 3273 - protein, 7 aa, synthetic construct
RFDTVLE

SEQ ID NO: 3274 - protein, 7 aa, synthetic construct
YNKILVE

SEQ ID NO: 3275 - protein, 7 aa, synthetic construct
VDKAGLE

SEQ ID NO: 3276 - protein, 7 aa, synthetic construct
IKGRMLE

SEQ ID NO: 3277 - protein, 7 aa, synthetic construct
DINWVFE

SEQ ID NO: 3278 - protein, 7 aa, synthetic construct
HLLDMIV

SEQ ID NO: 3279 - protein, 7 aa, synthetic construct
SDVILLE

SEQ ID NO: 3280 - protein, 7 aa, synthetic construct
GMSHIVE

SEQ ID NO: 3281 - protein, 7 aa, synthetic construct
ISETVVD

SEQ ID NO: 3282 - protein, 7 aa, synthetic construct
KKTTLIE

SEQ ID NO: 3283 - protein, 7 aa, synthetic construct
GFADMIE

SEQ ID NO: 3284 - protein, 7 aa, synthetic construct
ILNGLVE

SEQ ID NO: 3285 - protein, 7 aa, synthetic construct
IPQGFLE

SEQ ID NO: 3286 - protein, 7 aa, synthetic construct
DMGEFME

SEQ ID NO: 3287 - protein, 7 aa, synthetic construct
IRVVVMT

SEQ ID NO: 3288 - protein, 7 aa, synthetic construct
SQGKVIE

SEQ ID NO: 3289 - protein, 7 aa, synthetic construct
DLCSAME

SEQ ID NO: 3290 - protein, 7 aa, synthetic construct
TMLGGIE

SEQ ID NO: 3291 - protein, 7 aa, synthetic construct
NERVIIE

SEQ ID NO: 3292 - protein, 7 aa, synthetic construct
RRSNKLE

SEQ ID NO: 3293 - protein, 7 aa, synthetic construct
PVGCVIE

SEQ ID NO: 3294 - protein, 7 aa, synthetic construct
APGDVLE

SEQ ID NO: 3295 - protein, 7 aa, synthetic construct
MFRGALE

SEQ ID NO: 3296 - protein, 7 aa, synthetic construct
RKNQVIE

SEQ ID NO: 3297 - protein, 4 aa, synthetic construct
NVLW

SEQ ID NO: 3298 - protein, 7 aa, synthetic construct
INRGSLE

SEQ ID NO: 3299 - protein, 7 aa, synthetic construct
SSSVVLE

SEQ ID NO: 3300 - protein, 7 aa, synthetic construct
MGVQIME

SEQ ID NO: 3301 - protein, 6 aa, synthetic construct
PMRVWY

SEQ ID NO: 3302 - protein, 7 aa, synthetic construct
NIMMHGL

SEQ ID NO: 3303 - protein, 7 aa, synthetic construct
NMEGVLE

SEQ ID NO: 3304 - protein, 7 aa, synthetic construct
IKESVVE

SEQ ID NO: 3305 - protein, 7 aa, synthetic construct
ILNVFGE

SEQ ID NO: 3306 - protein, 7 aa, synthetic construct
MAEGMVE

SEQ ID NO: 3307 - protein, 7 aa, synthetic construct
MTVNMIE

SEQ ID NO: 3308 - protein, 7 aa, synthetic construct
MLAGAIE

SEQ ID NO: 3309 - protein, 7 aa, synthetic construct
TLGDRLE

SEQ ID NO: 3310 - protein, 7 aa, synthetic construct
FRDQLLE

SEQ ID NO: 3311 - protein, 7 aa, synthetic construct
GSNVKIE

SEQ ID NO: 3312 - protein, 7 aa, synthetic construct
DFGQIIE

SEQ ID NO: 3313 - protein, 7 aa, synthetic construct
VLVGGLE

SEQ ID NO: 3314 - protein, 7 aa, synthetic construct
WIGKMIE

SEQ ID NO: 3315 - protein, 7 aa, synthetic construct
GRKDVVE

SEQ ID NO: 3316 - protein, 7 aa, synthetic construct
RNLRLVE

SEQ ID NO: 3317 - protein, 7 aa, synthetic construct
GDNTILE

SEQ ID NO: 3318 - protein, 7 aa, synthetic construct
MENLIIG

SEQ ID NO: 3319 - protein, 7 aa, synthetic construct
RVEGLIE

SEQ ID NO: 3320 - protein, 7 aa, synthetic construct
MLGTLID

SEQ ID NO: 3321 - protein, 7 aa, synthetic construct
KLAAAVE

SEQ ID NO: 3322 - protein, 7 aa, synthetic construct
VRGLKLE

SEQ ID NO: 3323 - protein, 7 aa, synthetic construct
KWMHIME

SEQ ID NO: 3324 - protein, 7 aa, synthetic construct
VTNRLME

SEQ ID NO: 3325 - protein, 7 aa, synthetic construct
KTGRSVI

SEQ ID NO: 3326 - protein, 7 aa, synthetic construct
DSYILWR

SEQ ID NO: 3327 - protein, 7 aa, synthetic construct
LYPIAME

SEQ ID NO: 3328 - protein, 7 aa, synthetic construct
TIGKVLE

SEQ ID NO: 3329 - protein, 5 aa, synthetic construct
MMRRV

SEQ ID NO: 3330 - protein, 5 aa, synthetic construct
SIGVY

SEQ ID NO: 3331 - protein, 5 aa, synthetic construct
NGMAL

SEQ ID NO: 3332 - protein, 5 aa, synthetic construct
VVETG

SEQ ID NO: 3333 - protein, 5 aa, synthetic construct
DEGTL

SEQ ID NO: 3334 - protein, 5 aa, synthetic construct
RRDAY

SEQ ID NO: 3335 - protein, 5 aa, synthetic construct
VFEPD

SEQ ID NO: 3336 - protein, 5 aa, synthetic construct
GSGLN

SEQ ID NO: 3337 - protein, 5 aa, synthetic construct
DDPIL

SEQ ID NO: 3338 - protein, 5 aa, synthetic construct
GPQRD

SEQ ID NO: 3339 - protein, 5 aa, synthetic construct
VLAAY

SEQ ID NO: 3340 - protein, 5 aa, synthetic construct
GHSGH

SEQ ID NO: 3341 - protein, 4 aa, synthetic construct
VRPH

SEQ ID NO: 3342 - protein, 5 aa, synthetic construct
APRLN

SEQ ID NO: 3343 - protein, 5 aa, synthetic construct
RRGVR

SEQ ID NO: 3344 - protein, 5 aa, synthetic construct
VQKLY

SEQ ID NO: 3345 - protein, 4 aa, synthetic construct
VVWG

SEQ ID NO: 3346 - protein, 5 aa, synthetic construct
DLWTG

SEQ ID NO: 3347 - protein, 4 aa, synthetic construct
VWAD

SEQ ID NO: 3348 - protein, 4 aa, synthetic construct
LDDD

SEQ ID NO: 3349 - protein, 5 aa, synthetic construct
IGYGD

SEQ ID NO: 3350 - protein, 5 aa, synthetic construct
DDPVL

SEQ ID NO: 3351 - protein, 5 aa, synthetic construct
GRGVY

SEQ ID NO: 3352 - protein, 5 aa, synthetic construct
VGRVG

SEQ ID NO: 3353 - protein, 5 aa, synthetic construct
SVRDI

SEQ ID NO: 3354 - protein, 5 aa, synthetic construct
AKGRI

SEQ ID NO: 3355 - protein, 5 aa, synthetic construct
GDRRV

SEQ ID NO: 3356 - protein, 5 aa, synthetic construct
RVGRS

SEQ ID NO: 3357 - protein, 5 aa, synthetic construct
VRRVY

SEQ ID NO: 3358 - protein, 5 aa, synthetic construct
GQGGY

SEQ ID NO: 3359 - protein, 5 aa, synthetic construct
VRAGE

SEQ ID NO: 3360 - protein, 5 aa, synthetic construct
MSASY

SEQ ID NO: 3361 - protein, 5 aa, synthetic construct
GGGAY

SEQ ID NO: 3362 - protein, 5 aa, synthetic construct
GSALY

SEQ ID NO: 3363 - protein, 5 aa, synthetic construct
WFAAY

SEQ ID NO: 3364 - protein, 5 aa, synthetic construct
GVDVF

SEQ ID NO: 3365 - protein, 5 aa, synthetic construct
VRKVY

SEQ ID NO: 3366 - protein, 5 aa, synthetic construct
EGNMY

SEQ ID NO: 3367 - protein, 5 aa, synthetic construct
GAWWY

SEQ ID NO: 3368 - protein, 5 aa, synthetic construct
RNVRY

SEQ ID NO: 3369 - protein, 5 aa, synthetic construct
GPARI

SEQ ID NO: 3370 - protein, 5 aa, synthetic construct
MYGDY

SEQ ID NO: 3371 - protein, 5 aa, synthetic construct
WNEKY

SEQ ID NO: 3372 - protein, 5 aa, synthetic construct
YHGGI

SEQ ID NO: 3373 - protein, 5 aa, synthetic construct
VMVQY

SEQ ID NO: 3374 - protein, 5 aa, synthetic construct
GSCTY

SEQ ID NO: 3375 - protein, 5 aa, synthetic construct
RIVDM

SEQ ID NO: 3376 - protein, 5 aa, synthetic construct
GDNTY

SEQ ID NO: 3377 - protein, 5 aa, synthetic construct
GHIMY

SEQ ID NO: 3378 - protein, 5 aa, synthetic construct
GFHGT

SEQ ID NO: 3379 - protein, 5 aa, synthetic construct
NADIY

SEQ ID NO: 3380 - protein, 5 aa, synthetic construct
GMTSY

SEQ ID NO: 3381 - protein, 4 aa, synthetic construct
WDSI

SEQ ID NO: 3382 - protein, 5 aa, synthetic construct
VSDGL

SEQ ID NO: 3383 - protein, 5 aa, synthetic construct
QADDI

SEQ ID NO: 3384 - protein, 5 aa, synthetic construct
GKHSY

SEQ ID NO: 3385 - protein, 5 aa, synthetic construct
VSHMY

SEQ ID NO: 3386 - protein, 5 aa, synthetic construct
NDRIY

SEQ ID NO: 3387 - protein, 5 aa, synthetic construct
GSGSN

SEQ ID NO: 3388 - protein, 5 aa, synthetic construct
GIEEY

SEQ ID NO: 3389 - protein, 5 aa, synthetic construct
RGVRY

SEQ ID NO: 3390 - protein, 5 aa, synthetic construct
GRGEN

SEQ ID NO: 3391 - protein, 5 aa, synthetic construct
KGQVY

SEQ ID NO: 3392 - protein, 4 aa, synthetic construct
GQIV

SEQ ID NO: 3393 - protein, 5 aa, synthetic construct
SDLEG

SEQ ID NO: 3394 - protein, 5 aa, synthetic construct
VKDDG

SEQ ID NO: 3395 - protein, 5 aa, synthetic construct
GNYGM

SEQ ID NO: 3396 - protein, 5 aa, synthetic construct
NVVGY

SEQ ID NO: 3397 - protein, 5 aa, synthetic construct
GRMTY

SEQ ID NO: 3398 - protein, 5 aa, synthetic construct
NVGGY

SEQ ID NO: 3399 - protein, 5 aa, synthetic construct
RLARG

SEQ ID NO: 3400 - protein, 5 aa, synthetic construct
VSNGA

SEQ ID NO: 3401 - protein, 5 aa, synthetic construct
MMAFY

SEQ ID NO: 3402 - protein, 5 aa, synthetic construct
IPAME

SEQ ID NO: 3403 - protein, 5 aa, synthetic construct
GGADY

SEQ ID NO: 3404 - protein, 5 aa, synthetic construct
GRTDY

SEQ ID NO: 3405 - protein, 5 aa, synthetic construct
HSGDM

SEQ ID NO: 3406 - protein, 5 aa, synthetic construct
MRDGG

SEQ ID NO: 3407 - protein, 5 aa, synthetic construct
ANNVY

SEQ ID NO: 3408 - protein, 5 aa, synthetic construct
KDIRF

SEQ ID NO: 3409 - protein, 5 aa, synthetic construct
IGGGY

SEQ ID NO: 3410 - protein, 5 aa, synthetic construct
GRLRS

SEQ ID NO: 3411 - protein, 5 aa, synthetic construct
VSLGE

SEQ ID NO: 3412 - protein, 5 aa, synthetic construct
TQCDY

SEQ ID NO: 3413 - protein, 5 aa, synthetic construct
RSGSY

SEQ ID NO: 3414 - protein, 5 aa, synthetic construct
GDGFY

SEQ ID NO: 3415 - protein, 5 aa, synthetic construct
GVNDY

SEQ ID NO: 3416 - protein, 5 aa, synthetic construct
VQHYS

SEQ ID NO: 3417 - protein, 5 aa, synthetic construct
NRGQS

SEQ ID NO: 3418 - protein, 5 aa, synthetic construct
GYGVY

SEQ ID NO: 3419 - protein, 5 aa, synthetic construct
DGEFG

SEQ ID NO: 3420 - protein, 5 aa, synthetic construct
GLGVY

SEQ ID NO: 3421 - protein, 5 aa, synthetic construct
GTATY

SEQ ID NO: 3422 - protein, 5 aa, synthetic construct
GMRQV

SEQ ID NO: 3423 - protein, 5 aa, synthetic construct
IARNY

SEQ ID NO: 3424 - protein, 5 aa, synthetic construct
CRVGL

SEQ ID NO: 3425 - protein, 5 aa, synthetic construct
GFHQD

SEQ ID NO: 3426 - protein, 5 aa, synthetic construct
GLGHY

SEQ ID NO: 3427 - protein, 5 aa, synthetic construct
RARAL

SEQ ID NO: 3428 - protein, 5 aa, synthetic construct
GRTLY

SEQ ID NO: 3429 - protein, 5 aa, synthetic construct
DGLGY

SEQ ID NO: 3430 - protein, 5 aa, synthetic construct
NVSVY

SEQ ID NO: 3431 - protein, 5 aa, synthetic construct
ATTGG

SEQ ID NO: 3432 - protein, 5 aa, synthetic construct
GFRTA

SEQ ID NO: 3433 - protein, 5 aa, synthetic construct
GFGGR

SEQ ID NO: 3434 - protein, 5 aa, synthetic construct
WLRGG

SEQ ID NO: 3435 - protein, 5 aa, synthetic construct
VRTGR

SEQ ID NO: 3436 - protein, 5 aa, synthetic construct
GGRRY

SEQ ID NO: 3437 - protein, 5 aa, synthetic construct
YRQAM

SEQ ID NO: 3438 - protein, 5 aa, synthetic construct
VNNGD

SEQ ID NO: 3439 - protein, 5 aa, synthetic construct
GSGMY

SEQ ID NO: 3440 - protein, 5 aa, synthetic construct
AQAVY

SEQ ID NO: 3441 - protein, 5 aa, synthetic construct
DRVGY

SEQ ID NO: 3442 - protein, 5 aa, synthetic construct
GIDRS

SEQ ID NO: 3443 - protein, 5 aa, synthetic construct
KVVDN

SEQ ID NO: 3444 - protein, 5 aa, synthetic construct
REALY

SEQ ID NO: 3445 - protein, 5 aa, synthetic construct
ARVWY

SEQ ID NO: 3446 - protein, 5 aa, synthetic construct
AAIGR

SEQ ID NO: 3447 - protein, 5 aa, synthetic construct
TRNDY

SEQ ID NO: 3448 - protein, 5 aa, synthetic construct
GRSAG

SEQ ID NO: 3449 - protein, 5 aa, synthetic construct
GSHTY

SEQ ID NO: 3450 - protein, 5 aa, synthetic construct
GRRVL

SEQ ID NO: 3451 - protein, 5 aa, synthetic construct
GVYHM

SEQ ID NO: 3452 - protein, 5 aa, synthetic construct
LQNDY

SEQ ID NO: 3453 - protein, 5 aa, synthetic construct
GRGGQ

SEQ ID NO: 3454 - protein, 5 aa, synthetic construct
GQTVN

SEQ ID NO: 3455 - protein, 5 aa, synthetic construct
GRGRL

SEQ ID NO: 3456 - protein, 5 aa, synthetic construct
VRRQW

SEQ ID NO: 3457 - protein, 5 aa, synthetic construct
GRTME

SEQ ID NO: 3458 - protein, 5 aa, synthetic construct
GQNLF

SEQ ID NO: 3459 - protein, 5 aa, synthetic construct
ARNRY

SEQ ID NO: 3460 - protein, 5 aa, synthetic construct
GFNGL

SEQ ID NO: 3461 - protein, 5 aa, synthetic construct
GTSKF

SEQ ID NO: 3462 - protein, 5 aa, synthetic construct
VRYNG

SEQ ID NO: 3463 - protein, 5 aa, synthetic construct
VRNNW

SEQ ID NO: 3464 - protein, 5 aa, synthetic construct
GLGWL

SEQ ID NO: 3465 - protein, 5 aa, synthetic construct
VANAY

SEQ ID NO: 3466 - protein, 5 aa, synthetic construct
AQRAY

SEQ ID NO: 3467 - protein, 5 aa, synthetic construct
IRRAG

SEQ ID NO: 3468 - protein, 5 aa, synthetic construct
ARVAS

SEQ ID NO: 3469 - protein, 5 aa, synthetic construct
NRRVY

SEQ ID NO: 3470 - protein, 5 aa, synthetic construct
AHRDY

SEQ ID NO: 3471 - protein, 5 aa, synthetic construct
SGRSY

SEQ ID NO: 3472 - protein, 5 aa, synthetic construct
NRDGY

SEQ ID NO: 3473 - protein, 5 aa, synthetic construct
IVRDY

SEQ ID NO: 3474 - protein, 5 aa, synthetic construct
GRDSY

SEQ ID NO: 3475 - protein, 5 aa, synthetic construct
MYGHY

SEQ ID NO: 3476 - protein, 5 aa, synthetic construct
GQRVG

SEQ ID NO: 3477 - protein, 5 aa, synthetic construct
GRSTA

SEQ ID NO: 3478 - protein, 5 aa, synthetic construct
GDAGL

SEQ ID NO: 3479 - protein, 5 aa, synthetic construct
SIGWY

SEQ ID NO: 3480 - protein, 5 aa, synthetic construct
GGVRA

SEQ ID NO: 3481 - protein, 5 aa, synthetic construct
WRGNS

SEQ ID NO: 3482 - protein, 5 aa, synthetic construct
LHVDY

SEQ ID NO: 3483 - protein, 5 aa, synthetic construct
RDMDY

SEQ ID NO: 3484 - protein, 5 aa, synthetic construct
GTGMH

SEQ ID NO: 3485 - protein, 5 aa, synthetic construct
GRDAT

SEQ ID NO: 3486 - protein, 5 aa, synthetic construct
GFCER

SEQ ID NO: 3487 - protein, 5 aa, synthetic construct
ENQDY

SEQ ID NO: 3488 - protein, 5 aa, synthetic construct
VHNGS

SEQ ID NO: 3489 - protein, 5 aa, synthetic construct
GYGQY

SEQ ID NO: 3490 - protein, 5 aa, synthetic construct
MRQIY

SEQ ID NO: 3491 - protein, 5 aa, synthetic construct
VRDAN

SEQ ID NO: 3492 - protein, 5 aa, synthetic construct
GANLG

SEQ ID NO: 3493 - protein, 5 aa, synthetic construct
RTAVY

SEQ ID NO: 3494 - protein, 5 aa, synthetic construct
DDGWY

SEQ ID NO: 3495 - protein, 5 aa, synthetic construct
GQIAY

SEQ ID NO: 3496 - protein, 5 aa, synthetic construct
MNGPY

SEQ ID NO: 3497 - protein, 5 aa, synthetic construct
RLLSY

SEQ ID NO: 3498 - protein, 5 aa, synthetic construct
SMAKY

SEQ ID NO: 3499 - protein, 5 aa, synthetic construct
GRGGS

SEQ ID NO: 3500 - protein, 5 aa, synthetic construct
SDGPY

SEQ ID NO: 3501 - protein, 5 aa, synthetic construct
VSYGD

SEQ ID NO: 3502 - protein, 5 aa, synthetic construct
GGVFY

SEQ ID NO: 3503 - protein, 5 aa, synthetic construct
TRHHD

SEQ ID NO: 3504 - protein, 5 aa, synthetic construct
VRHDD

SEQ ID NO: 3505 - protein, 5 aa, synthetic construct
GRDSL

SEQ ID NO: 3506 - protein, 5 aa, synthetic construct
GMDMY

SEQ ID NO: 3507 - protein, 5 aa, synthetic construct
GSRTY

SEQ ID NO: 3508 - protein, 5 aa, synthetic construct
VADAY

SEQ ID NO: 3509 - protein, 5 aa, synthetic construct
SVNIY

SEQ ID NO: 3510 - protein, 5 aa, synthetic construct
NVTVY

SEQ ID NO: 3511 - protein, 5 aa, synthetic construct
GGFMY

SEQ ID NO: 3512 - protein, 5 aa, synthetic construct
GTGPY

SEQ ID NO: 3513 - protein, 5 aa, synthetic construct
AVRLW

SEQ ID NO: 3514 - protein, 5 aa, synthetic construct
FNSTY

SEQ ID NO: 3515 - protein, 5 aa, synthetic construct
GGRVY

SEQ ID NO: 3516 - protein, 5 aa, synthetic construct
GRDMS

SEQ ID NO: 3517 - protein, 5 aa, synthetic construct
GAGKW

SEQ ID NO: 3518 - protein, 5 aa, synthetic construct
WVRAY

SEQ ID NO: 3519 - protein, 5 aa, synthetic construct
GMHEY

SEQ ID NO: 3520 - protein, 5 aa, synthetic construct
RHTAY

SEQ ID NO: 3521 - protein, 5 aa, synthetic construct
GRGTG

SEQ ID NO: 3522 - protein, 5 aa, synthetic construct
GHGVR

SEQ ID NO: 3523 - protein, 5 aa, synthetic construct
RNVNY

SEQ ID NO: 3524 - protein, 5 aa, synthetic construct
WREHY

SEQ ID NO: 3525 - protein, 5 aa, synthetic construct
GAGNA

SEQ ID NO: 3526 - protein, 5 aa, synthetic construct
MRIAY

SEQ ID NO: 3527 - protein, 5 aa, synthetic construct
GHDLY

SEQ ID NO: 3528 - protein, 5 aa, synthetic construct
GMAWE

SEQ ID NO: 3529 - protein, 5 aa, synthetic construct
VRDDD

SEQ ID NO: 3530 - protein, 5 aa, synthetic construct
CKHRV

SEQ ID NO: 3531 - protein, 5 aa, synthetic construct
GRSGW

SEQ ID NO: 3532 - protein, 5 aa, synthetic construct
GFRII

SEQ ID NO: 3533 - protein, 5 aa, synthetic construct
SSDTY

SEQ ID NO: 3534 - protein, 5 aa, synthetic construct
WHTSG

SEQ ID NO: 3535 - protein, 5 aa, synthetic construct
RRTVY

SEQ ID NO: 3536 - protein, 5 aa, synthetic construct
VTHTG

SEQ ID NO: 3537 - protein, 5 aa, synthetic construct
GDAIY

SEQ ID NO: 3538 - protein, 5 aa, synthetic construct
GFHGC

SEQ ID NO: 3539 - protein, 5 aa, synthetic construct
GMSNY

SEQ ID NO: 3540 - protein, 5 aa, synthetic construct
GKGRY

SEQ ID NO: 3541 - protein, 5 aa, synthetic construct
VKNYN

SEQ ID NO: 3542 - protein, 5 aa, synthetic construct
GRVVY

SEQ ID NO: 3543 - protein, 5 aa, synthetic construct
MSSSY

SEQ ID NO: 3544 - protein, 5 aa, synthetic construct
DWLEG

SEQ ID NO: 3545 - protein, 5 aa, synthetic construct
VGGPY

SEQ ID NO: 3546 - protein, 5 aa, synthetic construct
GNDRL

SEQ ID NO: 3547 - protein, 5 aa, synthetic construct
VQACY

SEQ ID NO: 3548 - protein, 5 aa, synthetic construct
GLVLY

SEQ ID NO: 3549 - protein, 5 aa, synthetic construct
VVAMD

SEQ ID NO: 3550 - protein, 5 aa, synthetic construct
GAGMY

SEQ ID NO: 3551 - protein, 5 aa, synthetic construct
GHAHD

SEQ ID NO: 3552 - protein, 5 aa, synthetic construct
VRANW

SEQ ID NO: 3553 - protein, 5 aa, synthetic construct
GICGY

SEQ ID NO: 3554 - protein, 5 aa, synthetic construct
GTVHY

SEQ ID NO: 3555 - protein, 5 aa, synthetic construct
GFELI

SEQ ID NO: 3556 - protein, 5 aa, synthetic construct
GRGQR

SEQ ID NO: 3557 - protein, 5 aa, synthetic construct
NSDLY

SEQ ID NO: 3558 - protein, 5 aa, synthetic construct
GNGHY

SEQ ID NO: 3559 - protein, 5 aa, synthetic construct
GRRCY

SEQ ID NO: 3560 - protein, 5 aa, synthetic construct
VGQLY

SEQ ID NO: 3561 - protein, 5 aa, synthetic construct
ARLDV

SEQ ID NO: 3562 - protein, 5 aa, synthetic construct
GHDVY

SEQ ID NO: 3563 - protein, 5 aa, synthetic construct
GTDFV

SEQ ID NO: 3564 - protein, 5 aa, synthetic construct
GRGIY

SEQ ID NO: 3565 - protein, 5 aa, synthetic construct
GFRTN

SEQ ID NO: 3566 - protein, 5 aa, synthetic construct
GGSWG

SEQ ID NO: 3567 - protein, 5 aa, synthetic construct
GMMNY

SEQ ID NO: 3568 - protein, 5 aa, synthetic construct
GFHGD

SEQ ID NO: 3569 - protein, 5 aa, synthetic construct
GFGEK

SEQ ID NO: 3570 - protein, 5 aa, synthetic construct
DFRTI

SEQ ID NO: 3571 - protein, 5 aa, synthetic construct
ATCRY

SEQ ID NO: 3572 - protein, 5 aa, synthetic construct
GQDVY

SEQ ID NO: 3573 - protein, 5 aa, synthetic construct
MLRMY

SEQ ID NO: 3574 - protein, 5 aa, synthetic construct
TQGYA

SEQ ID NO: 3575 - protein, 5 aa, synthetic construct
GCNGY

SEQ ID NO: 3576 - protein, 5 aa, synthetic construct
ARNEY

SEQ ID NO: 3577 - protein, 5 aa, synthetic construct
GRSMY

SEQ ID NO: 3578 - protein, 5 aa, synthetic construct
RSVEY

SEQ ID NO: 3579 - protein, 5 aa, synthetic construct
WLETY

SEQ ID NO: 3580 - protein, 5 aa, synthetic construct
GLRHS

SEQ ID NO: 3581 - protein, 5 aa, synthetic construct
SSGEY

SEQ ID NO: 3582 - protein, 5 aa, synthetic construct
ARHAW

SEQ ID NO: 3583 - protein, 5 aa, synthetic construct
VQRGI

SEQ ID NO: 3584 - protein, 5 aa, synthetic construct
GRAVY

SEQ ID NO: 3585 - protein, 5 aa, synthetic construct
GFGYR

SEQ ID NO: 3586 - protein, 5 aa, synthetic construct
GFHEL

SEQ ID NO: 3587 - protein, 5 aa, synthetic construct
RRGSY

SEQ ID NO: 3588 - protein, 5 aa, synthetic construct
EDMTY

SEQ ID NO: 3589 - protein, 5 aa, synthetic construct
GVGVD

SEQ ID NO: 3590 - protein, 5 aa, synthetic construct
CNQGY

SEQ ID NO: 3591 - protein, 5 aa, synthetic construct
GSHVG

SEQ ID NO: 3592 - protein, 5 aa, synthetic construct
GFKAV

SEQ ID NO: 3593 - protein, 5 aa, synthetic construct
GFGIS

SEQ ID NO: 3594 - protein, 5 aa, synthetic construct
GHGGL

SEQ ID NO: 3595 - protein, 5 aa, synthetic construct
IGNAF

SEQ ID NO: 3596 - protein, 5 aa, synthetic construct
GFGLR

SEQ ID NO: 3597 - protein, 5 aa, synthetic construct
GRTRY

SEQ ID NO: 3598 - protein, 5 aa, synthetic construct
VHHDY

SEQ ID NO: 3599 - protein, 5 aa, synthetic construct
TNGGV

SEQ ID NO: 3600 - protein, 5 aa, synthetic construct
GPADV

SEQ ID NO: 3601 - protein, 6 aa, synthetic construct
NREKAY

SEQ ID NO: 3602 - protein, 4 aa, synthetic construct
RRIE

SEQ ID NO: 3603 - protein, 5 aa, synthetic construct
TGGIY

SEQ ID NO: 3604 - protein, 5 aa, synthetic construct
RDMSY

SEQ ID NO: 3605 - protein, 5 aa, synthetic construct
MIDTY

SEQ ID NO: 3606 - protein, 5 aa, synthetic construct
GNALY

SEQ ID NO: 3607 - protein, 5 aa, synthetic construct
GVGVA

SEQ ID NO: 3608 - protein, 5 aa, synthetic construct
YASNY

SEQ ID NO: 3609 - protein, 5 aa, synthetic construct
GRSVY

SEQ ID NO: 3610 - protein, 5 aa, synthetic construct
MMYDY

SEQ ID NO: 3611 - protein, 5 aa, synthetic construct
VSSAG

SEQ ID NO: 3612 - protein, 5 aa, synthetic construct
GFQTM

SEQ ID NO: 3613 - protein, 5 aa, synthetic construct
TAGVY

SEQ ID NO: 3614 - protein, 5 aa, synthetic construct
GRASS

SEQ ID NO: 3615 - protein, 5 aa, synthetic construct
VRDGH

SEQ ID NO: 3616 - protein, 5 aa, synthetic construct
GKGWT

SEQ ID NO: 3617 - protein, 5 aa, synthetic construct
GMGIY

SEQ ID NO: 3618 - protein, 5 aa, synthetic construct
GSRWD

SEQ ID NO: 3619 - protein, 5 aa, synthetic construct
GNKVY

SEQ ID NO: 3620 - protein, 5 aa, synthetic construct
GLSKA

SEQ ID NO: 3621 - protein, 5 aa, synthetic construct
GSRQY

SEQ ID NO: 3622 - protein, 5 aa, synthetic construct
WGHVY

SEQ ID NO: 3623 - protein, 5 aa, synthetic construct
GRLDY

SEQ ID NO: 3624 - protein, 5 aa, synthetic construct
VMSSY

SEQ ID NO: 3625 - protein, 5 aa, synthetic construct
GYGGR

SEQ ID NO: 3626 - protein, 5 aa, synthetic construct
GSRVY

SEQ ID NO: 3627 - protein, 5 aa, synthetic construct
GAGLY

SEQ ID NO: 3628 - protein, 5 aa, synthetic construct
GRNVY

SEQ ID NO: 3629 - protein, 5 aa, synthetic construct
GFGYK

SEQ ID NO: 3630 - protein, 5 aa, synthetic construct
GFHGL

SEQ ID NO: 3631 - protein, 5 aa, synthetic construct
GSSDY

SEQ ID NO: 3632 - protein, 5 aa, synthetic construct
GARDY

SEQ ID NO: 3633 - protein, 5 aa, synthetic construct
GSNGS

SEQ ID NO: 3634 - protein, 5 aa, synthetic construct
WRWVD

SEQ ID NO: 3635 - protein, 5 aa, synthetic construct
GQNRY

SEQ ID NO: 3636 - protein, 5 aa, synthetic construct
GDRRS

SEQ ID NO: 3637 - protein, 5 aa, synthetic construct
GLTVD

SEQ ID NO: 3638 - protein, 5 aa, synthetic construct
MGTDY

SEQ ID NO: 3639 - protein, 5 aa, synthetic construct
GQSAY

SEQ ID NO: 3640 - protein, 5 aa, synthetic construct
TRKDM

SEQ ID NO: 3641 - protein, 5 aa, synthetic construct
GFGTA

SEQ ID NO: 3642 - protein, 5 aa, synthetic construct
QVGRC

SEQ ID NO: 3643 - protein, 5 aa, synthetic construct
ARLLN

SEQ ID NO: 3644 - protein, 5 aa, synthetic construct
TVGCY

SEQ ID NO: 3645 - protein, 5 aa, synthetic construct
GGGEY

SEQ ID NO: 3646 - protein, 5 aa, synthetic construct
GFKNV

SEQ ID NO: 3647 - protein, 5 aa, synthetic construct
DEVFY

SEQ ID NO: 3648 - protein, 5 aa, synthetic construct
MGVAY

SEQ ID NO: 3649 - protein, 5 aa, synthetic construct
MRHDY

SEQ ID NO: 3650 - protein, 5 aa, synthetic construct
GLDRA

SEQ ID NO: 3651 - protein, 5 aa, synthetic construct
GFGGL

SEQ ID NO: 3652 - protein, 5 aa, synthetic construct
GGGNY

SEQ ID NO: 3653 - protein, 5 aa, synthetic construct
FTDIV

SEQ ID NO: 3654 - protein, 5 aa, synthetic construct
GVLTD

SEQ ID NO: 3655 - protein, 5 aa, synthetic construct
TRDAA

SEQ ID NO: 3656 - protein, 5 aa, synthetic construct
FHGTY

SEQ ID NO: 3657 - protein, 5 aa, synthetic construct
GRGIC

SEQ ID NO: 3658 - protein, 5 aa, synthetic construct
MRRSD

SEQ ID NO: 3659 - protein, 5 aa, synthetic construct
MPSIY

SEQ ID NO: 3660 - protein, 5 aa, synthetic construct
VQKDY

SEQ ID NO: 3661 - protein, 5 aa, synthetic construct
MAGDY

SEQ ID NO: 3662 - protein, 5 aa, synthetic construct
IGHGN

SEQ ID NO: 3663 - protein, 5 aa, synthetic construct
ISRDA

SEQ ID NO: 3664 - protein, 5 aa, synthetic construct
GHLDY

SEQ ID NO: 3665 - protein, 5 aa, synthetic construct
GMDDY

SEQ ID NO: 3666 - protein, 5 aa, synthetic construct
GSGVY

SEQ ID NO: 3667 - protein, 5 aa, synthetic construct
GNNVT

SEQ ID NO: 3668 - protein, 5 aa, synthetic construct
CTGAY

SEQ ID NO: 3669 - protein, 5 aa, synthetic construct
GGNVF

SEQ ID NO: 3670 - protein, 5 aa, synthetic construct
DTVFY

SEQ ID NO: 3671 - protein, 5 aa, synthetic construct
FNGAY

SEQ ID NO: 3672 - protein, 5 aa, synthetic construct
GFGWV

SEQ ID NO: 3673 - protein, 5 aa, synthetic construct
GFGPS

SEQ ID NO: 3674 - protein, 5 aa, synthetic construct
GRHGL

SEQ ID NO: 3675 - protein, 5 aa, synthetic construct
TSGGY

SEQ ID NO: 3676 - protein, 5 aa, synthetic construct
MMRTY

SEQ ID NO: 3677 - protein, 5 aa, synthetic construct
GHADW

SEQ ID NO: 3678 - protein, 5 aa, synthetic construct
CVHMY

SEQ ID NO: 3679 - protein, 5 aa, synthetic construct
AFHGF

SEQ ID NO: 3680 - protein, 5 aa, synthetic construct
SRDTA

SEQ ID NO: 3681 - protein, 5 aa, synthetic construct
VRVGG

SEQ ID NO: 3682 - protein, 5 aa, synthetic construct
RHCDY

SEQ ID NO: 3683 - protein, 5 aa, synthetic construct
IEGRM

SEQ ID NO: 3684 - protein, 5 aa, synthetic construct
WSRGS

SEQ ID NO: 3685 - protein, 5 aa, synthetic construct
GGSSY

SEQ ID NO: 3686 - protein, 5 aa, synthetic construct
GMNGS

SEQ ID NO: 3687 - protein, 5 aa, synthetic construct
GRAEY

SEQ ID NO: 3688 - protein, 5 aa, synthetic construct
GATMY

SEQ ID NO: 3689 - protein, 5 aa, synthetic construct
ANDAR

SEQ ID NO: 3690 - protein, 5 aa, synthetic construct
GNLGL

SEQ ID NO: 3691 - protein, 5 aa, synthetic construct
VTCLY

SEQ ID NO: 3692 - protein, 5 aa, synthetic construct
MITRY

SEQ ID NO: 3693 - protein, 5 aa, synthetic construct
VRDRV

SEQ ID NO: 3694 - protein, 5 aa, synthetic construct
CQGIY

SEQ ID NO: 3695 - protein, 5 aa, synthetic construct
GVGAY

SEQ ID NO: 3696 - protein, 5 aa, synthetic construct
GTSTY

SEQ ID NO: 3697 - protein, 5 aa, synthetic construct
GVGRR

SEQ ID NO: 3698 - protein, 5 aa, synthetic construct
GFRVY

SEQ ID NO: 3699 - protein, 4 aa, synthetic construct
MAFP

SEQ ID NO: 3700 - protein, 5 aa, synthetic construct
GNNWY

SEQ ID NO: 3701 - protein, 5 aa, synthetic construct
GQNWY

SEQ ID NO: 3702 - protein, 5 aa, synthetic construct
GTQTY

SEQ ID NO: 3703 - protein, 5 aa, synthetic construct
GFGGC

SEQ ID NO: 3704 - protein, 5 aa, synthetic construct
SNKYY

SEQ ID NO: 3705 - protein, 4 aa, synthetic construct
RKVG

SEQ ID NO: 3706 - protein, 5 aa, synthetic construct
GVGTY

SEQ ID NO: 3707 - protein, 5 aa, synthetic construct
GVMLY

SEQ ID NO: 3708 - protein, 5 aa, synthetic construct
GCMGY

SEQ ID NO: 3709 - protein, 5 aa, synthetic construct
IRTGG

SEQ ID NO: 3710 - protein, 5 aa, synthetic construct
GNTLW

SEQ ID NO: 3711 - protein, 5 aa, synthetic construct
SSHHA

SEQ ID NO: 3712 - protein, 5 aa, synthetic construct
MTGTY

SEQ ID NO: 3713 - protein, 5 aa, synthetic construct
IRNVY

SEQ ID NO: 3714 - protein, 5 aa, synthetic construct
GIVVY

SEQ ID NO: 3715 - protein, 5 aa, synthetic construct
YRWPL

SEQ ID NO: 3716 - protein, 5 aa, synthetic construct
GFNTV

SEQ ID NO: 3717 - protein, 5 aa, synthetic construct
GYHGI

SEQ ID NO: 3718 - protein, 5 aa, synthetic construct
GPSAV

SEQ ID NO: 3719 - protein, 5 aa, synthetic construct
GHGDY

SEQ ID NO: 3720 - protein, 5 aa, synthetic construct
WRQGN

SEQ ID NO: 3721 - protein, 5 aa, synthetic construct
LRQGY

SEQ ID NO: 3722 - protein, 5 aa, synthetic construct
VRDRT

SEQ ID NO: 3723 - protein, 5 aa, synthetic construct
GLATF

SEQ ID NO: 3724 - protein, 5 aa, synthetic construct
GVRAV

SEQ ID NO: 3725 - protein, 5 aa, synthetic construct
GHRLY

SEQ ID NO: 3726 - protein, 5 aa, synthetic construct
VKGNL

SEQ ID NO: 3727 - protein, 5 aa, synthetic construct
GNDKN

SEQ ID NO: 3728 - protein, 5 aa, synthetic construct
GSHVY

SEQ ID NO: 3729 - protein, 5 aa, synthetic construct
VANGD

SEQ ID NO: 3730 - protein, 5 aa, synthetic construct
GAWRY

SEQ ID NO: 3731 - protein, 5 aa, synthetic construct
GTGLY

SEQ ID NO: 3732 - protein, 5 aa, synthetic construct
GGCRY

SEQ ID NO: 3733 - protein, 5 aa, synthetic construct
GSGTY

SEQ ID NO: 3734 - protein, 5 aa, synthetic construct
MASVY

SEQ ID NO: 3735 - protein, 5 aa, synthetic construct
GRGSN

SEQ ID NO: 3736 - protein, 5 aa, synthetic construct
AYCDY

SEQ ID NO: 3737 - protein, 5 aa, synthetic construct
KVGEY

SEQ ID NO: 3738 - protein, 5 aa, synthetic construct
ARSEY

SEQ ID NO: 3739 - protein, 5 aa, synthetic construct
NYYDY

SEQ ID NO: 3740 - protein, 5 aa, synthetic construct
GRGAY

SEQ ID NO: 3741 - protein, 5 aa, synthetic construct
MASGY

SEQ ID NO: 3742 - protein, 5 aa, synthetic construct
GPGPS

SEQ ID NO: 3743 - protein, 5 aa, synthetic construct
GSRMT

SEQ ID NO: 3744 - protein, 5 aa, synthetic construct
GKRNY

SEQ ID NO: 3745 - protein, 5 aa, synthetic construct
SKAGY

SEQ ID NO: 3746 - protein, 5 aa, synthetic construct
GNSKF

SEQ ID NO: 3747 - protein, 5 aa, synthetic construct
GMGAG

SEQ ID NO: 3748 - protein, 5 aa, synthetic construct
SGLAY

SEQ ID NO: 3749 - protein, 5 aa, synthetic construct
ADAAR

SEQ ID NO: 3750 - protein, 4 aa, synthetic construct
SLCT

SEQ ID NO: 3751 - protein, 5 aa, synthetic construct
WDWDG

SEQ ID NO: 3752 - protein, 5 aa, synthetic construct
GVNGE

SEQ ID NO: 3753 - protein, 4 aa, synthetic construct
RAAL

SEQ ID NO: 3754 - protein, 5 aa, synthetic construct
NRRSY

SEQ ID NO: 3755 - protein, 5 aa, synthetic construct
ANQAS

SEQ ID NO: 3756 - protein, 5 aa, synthetic construct
GHSAY

SEQ ID NO: 3757 - protein, 5 aa, synthetic construct
NRASR

SEQ ID NO: 3758 - protein, 5 aa, synthetic construct
VTRSG

SEQ ID NO: 3759 - protein, 5 aa, synthetic construct
GFGTN

SEQ ID NO: 3760 - protein, 5 aa, synthetic construct
GRTRH

SEQ ID NO: 3761 - protein, 5 aa, synthetic construct
GSVSY

SEQ ID NO: 3762 - protein, 5 aa, synthetic construct
VQAAF

SEQ ID NO: 3763 - protein, 5 aa, synthetic construct
NREHI

SEQ ID NO: 3764 - protein, 5 aa, synthetic construct
NGAGS

SEQ ID NO: 3765 - protein, 5 aa, synthetic construct
GFGGT

SEQ ID NO: 3766 - protein, 5 aa, synthetic construct
RRLGS

SEQ ID NO: 3767 - protein, 5 aa, synthetic construct
TDGLY

SEQ ID NO: 3768 - protein, 5 aa, synthetic construct
VWMHR

SEQ ID NO: 3769 - protein, 5 aa, synthetic construct
NTRGS

SEQ ID NO: 3770 - protein, 5 aa, synthetic construct
GSMAY

SEQ ID NO: 3771 - protein, 5 aa, synthetic construct
MTHDY

SEQ ID NO: 3772 - protein, 5 aa, synthetic construct
VNGNG

SEQ ID NO: 3773 - protein, 5 aa, synthetic construct
GMSCY

SEQ ID NO: 3774 - protein, 5 aa, synthetic construct
NQGTY

SEQ ID NO: 3775 - protein, 5 aa, synthetic construct
DRLGD

SEQ ID NO: 3776 - protein, 5 aa, synthetic construct
GTGMY

SEQ ID NO: 3777 - protein, 5 aa, synthetic construct
GNTRY

SEQ ID NO: 3778 - protein, 5 aa, synthetic construct
GSCLN

SEQ ID NO: 3779 - protein, 5 aa, synthetic construct
VWHQY

SEQ ID NO: 3780 - protein, 5 aa, synthetic construct
GARNY

SEQ ID NO: 3781 - protein, 5 aa, synthetic construct
GHSGY

SEQ ID NO: 3782 - protein, 5 aa, synthetic construct
IMYGD

SEQ ID NO: 3783 - protein, 5 aa, synthetic construct
SAREY

SEQ ID NO: 3784 - protein, 5 aa, synthetic construct
GSRAY

SEQ ID NO: 3785 - protein, 5 aa, synthetic construct
GMSEY

SEQ ID NO: 3786 - protein, 5 aa, synthetic construct
WCSDY

SEQ ID NO: 3787 - protein, 5 aa, synthetic construct
IHSVY

SEQ ID NO: 3788 - protein, 5 aa, synthetic construct
RLGGY

SEQ ID NO: 3789 - protein, 5 aa, synthetic construct
RGKDY

SEQ ID NO: 3790 - protein, 5 aa, synthetic construct
GFQNV

SEQ ID NO: 3791 - protein, 5 aa, synthetic construct
RFAAY

SEQ ID NO: 3792 - protein, 5 aa, synthetic construct
GVGSY

SEQ ID NO: 3793 - protein, 5 aa, synthetic construct
GLNMD

SEQ ID NO: 3794 - protein, 5 aa, synthetic construct
CRYGL

SEQ ID NO: 3795 - protein, 5 aa, synthetic construct
SAGCH

SEQ ID NO: 3796 - protein, 5 aa, synthetic construct
SGHKF

SEQ ID NO: 3797 - protein, 5 aa, synthetic construct
RKIGY

SEQ ID NO: 3798 - protein, 5 aa, synthetic construct
GGLRY

SEQ ID NO: 3799 - protein, 5 aa, synthetic construct
RHEAY

SEQ ID NO: 3800 - protein, 5 aa, synthetic construct
VRRIY

SEQ ID NO: 3801 - protein, 5 aa, synthetic construct
TGLVW

SEQ ID NO: 3802 - protein, 5 aa, synthetic construct
GVRSY

SEQ ID NO: 3803 - protein, 5 aa, synthetic construct
GRSGY

SEQ ID NO: 3804 - protein, 5 aa, synthetic construct
VTSTY

SEQ ID NO: 3805 - protein, 5 aa, synthetic construct
KRDGL

SEQ ID NO: 3806 - protein, 5 aa, synthetic construct
KNDGY

SEQ ID NO: 3807 - protein, 5 aa, synthetic construct
GRLLT

SEQ ID NO: 3808 - protein, 5 aa, synthetic construct
GFGLA

SEQ ID NO: 3809 - protein, 5 aa, synthetic construct
VHRNS

SEQ ID NO: 3810 - protein, 5 aa, synthetic construct
VREDA

SEQ ID NO: 3811 - protein, 5 aa, synthetic construct
GFRWY

SEQ ID NO: 3812 - protein, 5 aa, synthetic construct
SSRMY

SEQ ID NO: 3813 - protein, 5 aa, synthetic construct
GGASY

SEQ ID NO: 3814 - protein, 5 aa, synthetic construct
NCHSG

SEQ ID NO: 3815 - protein, 5 aa, synthetic construct
GNSQG

SEQ ID NO: 3816 - protein, 5 aa, synthetic construct
GARLE

SEQ ID NO: 3817 - protein, 5 aa, synthetic construct
DGSHS

SEQ ID NO: 3818 - protein, 5 aa, synthetic construct
WRGNV

SEQ ID NO: 3819 - protein, 5 aa, synthetic construct
GIDIY

SEQ ID NO: 3820 - protein, 5 aa, synthetic construct
TRASY

SEQ ID NO: 3821 - protein, 5 aa, synthetic construct
GQTMY

SEQ ID NO: 3822 - protein, 5 aa, synthetic construct
GIFMV

SEQ ID NO: 3823 - protein, 5 aa, synthetic construct
GKNHG

SEQ ID NO: 3824 - protein, 5 aa, synthetic construct
GFGEV

SEQ ID NO: 3825 - protein, 5 aa, synthetic construct
GNRAR

SEQ ID NO: 3826 - protein, 5 aa, synthetic construct
VLNGI

SEQ ID NO: 3827 - protein, 5 aa, synthetic construct
GIGTY

SEQ ID NO: 3828 - protein, 5 aa, synthetic construct
WGVHY

SEQ ID NO: 3829 - protein, 5 aa, synthetic construct
AMRDY

SEQ ID NO: 3830 - protein, 5 aa, synthetic construct
MHTDY

SEQ ID NO: 3831 - protein, 5 aa, synthetic construct
GRTVD

SEQ ID NO: 3832 - protein, 5 aa, synthetic construct
VHLAY

SEQ ID NO: 3833 - protein, 5 aa, synthetic construct
VRNGS

SEQ ID NO: 3834 - protein, 5 aa, synthetic construct
GERAY

SEQ ID NO: 3835 - protein, 5 aa, synthetic construct
ANCSY

SEQ ID NO: 3836 - protein, 5 aa, synthetic construct
KAGIY

SEQ ID NO: 3837 - protein, 5 aa, synthetic construct
EPGYV

SEQ ID NO: 3838 - protein, 5 aa, synthetic construct
VVGHY

SEQ ID NO: 3839 - protein, 5 aa, synthetic construct
GNRDY

SEQ ID NO: 3840 - protein, 5 aa, synthetic construct
SDGMY

SEQ ID NO: 3841 - protein, 5 aa, synthetic construct
GEGVY

SEQ ID NO: 3842 - protein, 5 aa, synthetic construct
RMGGY

SEQ ID NO: 3843 - protein, 5 aa, synthetic construct
GSRGY

SEQ ID NO: 3844 - protein, 5 aa, synthetic construct
GYGWH

SEQ ID NO: 3845 - protein, 5 aa, synthetic construct
NTDSY

SEQ ID NO: 3846 - protein, 5 aa, synthetic construct
GSGWY

SEQ ID NO: 3847 - protein, 5 aa, synthetic construct
GNGSF

SEQ ID NO: 3848 - protein, 5 aa, synthetic construct
GRMDY

SEQ ID NO: 3849 - protein, 5 aa, synthetic construct
GFHSV

SEQ ID NO: 3850 - protein, 4 aa, synthetic construct
ASGF

SEQ ID NO: 3851 - protein, 5 aa, synthetic construct
GFGSR

SEQ ID NO: 3852 - protein, 5 aa, synthetic construct
GFGGG

SEQ ID NO: 3853 - protein, 5 aa, synthetic construct
DRFAV

SEQ ID NO: 3854 - protein, 5 aa, synthetic construct
GSGHY

SEQ ID NO: 3855 - protein, 5 aa, synthetic construct
GFHNV

SEQ ID NO: 3856 - protein, 5 aa, synthetic construct
GFLSI

SEQ ID NO: 3857 - protein, 5 aa, synthetic construct
GALMY

SEQ ID NO: 3858 - protein, 5 aa, synthetic construct
GSTKY

SEQ ID NO: 3859 - protein, 5 aa, synthetic construct
GNVAY

SEQ ID NO: 3860 - protein, 5 aa, synthetic construct
GRDSR

SEQ ID NO: 3861 - protein, 5 aa, synthetic construct
MRENL

SEQ ID NO: 3862 - protein, 5 aa, synthetic construct
GFGHD

SEQ ID NO: 3863 - protein, 5 aa, synthetic construct
DVNAY

SEQ ID NO: 3864 - protein, 5 aa, synthetic construct
GFLEQ

SEQ ID NO: 3865 - protein, 5 aa, synthetic construct
GLGSY

SEQ ID NO: 3866 - protein, 5 aa, synthetic construct
GSHLY

SEQ ID NO: 3867 - protein, 5 aa, synthetic construct
GRTAY

SEQ ID NO: 3868 - protein, 5 aa, synthetic construct
ATDMY

SEQ ID NO: 3869 - protein, 5 aa, synthetic construct
RRDLI

SEQ ID NO: 3870 - protein, 5 aa, synthetic construct
GGGDY

SEQ ID NO: 3871 - protein, 5 aa, synthetic construct
GTGSY

SEQ ID NO: 3872 - protein, 5 aa, synthetic construct
GHVVY

SEQ ID NO: 3873 - protein, 5 aa, synthetic construct
GTGVY

SEQ ID NO: 3874 - protein, 5 aa, synthetic construct
GVTCY

SEQ ID NO: 3875 - protein, 5 aa, synthetic construct
ARHEE

SEQ ID NO: 3876 - protein, 5 aa, synthetic construct
GNGTY

SEQ ID NO: 3877 - protein, 5 aa, synthetic construct
GTGAY

SEQ ID NO: 3878 - protein, 5 aa, synthetic construct
GSGAY

SEQ ID NO: 3879 - protein, 5 aa, synthetic construct
NSGLY

SEQ ID NO: 3880 - protein, 5 aa, synthetic construct
THGLA

SEQ ID NO: 3881 - protein, 5 aa, synthetic construct
RHLDY

SEQ ID NO: 3882 - protein, 5 aa, synthetic construct
GSRLY

SEQ ID NO: 3883 - protein, 5 aa, synthetic construct
GFGFY

SEQ ID NO: 3884 - protein, 5 aa, synthetic construct
MRSNY

SEQ ID NO: 3885 - protein, 5 aa, synthetic construct
VTDRY

SEQ ID NO: 3886 - protein, 5 aa, synthetic construct
RTALG

SEQ ID NO: 3887 - protein, 5 aa, synthetic construct
GRNLN

SEQ ID NO: 3888 - protein, 5 aa, synthetic construct
GFNEV

SEQ ID NO: 3889 - protein, 5 aa, synthetic construct
GIGEY

SEQ ID NO: 3890 - protein, 5 aa, synthetic construct
GSRIY

SEQ ID NO: 3891 - protein, 5 aa, synthetic construct
GFNSV

SEQ ID NO: 3892 - protein, 5 aa, synthetic construct
GIYHG

SEQ ID NO: 3893 - protein, 5 aa, synthetic construct
GFGQE

SEQ ID NO: 3894 - protein, 5 aa, synthetic construct
GLSDY

SEQ ID NO: 3895 - protein, 5 aa, synthetic construct
GMGTY

SEQ ID NO: 3896 - protein, 5 aa, synthetic construct
VAQGG

SEQ ID NO: 3897 - protein, 5 aa, synthetic construct
CGADY

SEQ ID NO: 3898 - protein, 5 aa, synthetic construct
GTRDY

SEQ ID NO: 3899 - protein, 5 aa, synthetic construct
GFGSS

SEQ ID NO: 3900 - protein, 5 aa, synthetic construct
NVGAW

SEQ ID NO: 3901 - protein, 5 aa, synthetic construct
CRSNY

SEQ ID NO: 3902 - protein, 5 aa, synthetic construct
SVHGT

SEQ ID NO: 3903 - protein, 5 aa, synthetic construct
GNGNY

SEQ ID NO: 3904 - protein, 5 aa, synthetic construct
GFGGV

SEQ ID NO: 3905 - protein, 5 aa, synthetic construct
FSSAS

SEQ ID NO: 3906 - protein, 5 aa, synthetic construct
SNVRM

SEQ ID NO: 3907 - protein, 5 aa, synthetic construct
GCGWY

SEQ ID NO: 3908 - protein, 5 aa, synthetic construct
CVSDY

SEQ ID NO: 3909 - protein, 5 aa, synthetic construct
NSGCY

SEQ ID NO: 3910 - protein, 5 aa, synthetic construct
GFGLM

SEQ ID NO: 3911 - protein, 5 aa, synthetic construct
CVEDY

SEQ ID NO: 3912 - protein, 5 aa, synthetic construct
KWECY

SEQ ID NO: 3913 - protein, 5 aa, synthetic construct
VRDSG

SEQ ID NO: 3914 - protein, 5 aa, synthetic construct
GFGSA

SEQ ID NO: 3915 - protein, 5 aa, synthetic construct
AKGHG

SEQ ID NO: 3916 - protein, 5 aa, synthetic construct
GFRST

SEQ ID NO: 3917 - protein, 5 aa, synthetic construct
WTWDV

SEQ ID NO: 3918 - protein, 5 aa, synthetic construct
AQVRY

SEQ ID NO: 3919 - protein, 4 aa, synthetic construct
PTLG

SEQ ID NO: 3920 - protein, 5 aa, synthetic construct
GAGTY

SEQ ID NO: 3921 - protein, 5 aa, synthetic construct
GFQGR

SEQ ID NO: 3922 - protein, 5 aa, synthetic construct
GYHGE

SEQ ID NO: 3923 - protein, 5 aa, synthetic construct
RSRDY

SEQ ID NO: 3924 - protein, 5 aa, synthetic construct
AFGGE

SEQ ID NO: 3925 - protein, 5 aa, synthetic construct
TSGVS

SEQ ID NO: 3926 - protein, 5 aa, synthetic construct
GRGLY

SEQ ID NO: 3927 - protein, 5 aa, synthetic construct
GTSAG

SEQ ID NO: 3928 - protein, 5 aa, synthetic construct
GYGGY

SEQ ID NO: 3929 - protein, 5 aa, synthetic construct
GYHGM

SEQ ID NO: 3930 - protein, 5 aa, synthetic construct
GSGIY

SEQ ID NO: 3931 - protein, 5 aa, synthetic construct
GVHWG

SEQ ID NO: 3932 - protein, 5 aa, synthetic construct
GSTLY

SEQ ID NO: 3933 - protein, 5 aa, synthetic construct
YGLRY

SEQ ID NO: 3934 - protein, 5 aa, synthetic construct
GSGLY

SEQ ID NO: 3935 - protein, 5 aa, synthetic construct
GSRYA

SEQ ID NO: 3936 - protein, 5 aa, synthetic construct
GFWNE

SEQ ID NO: 3937 - protein, 5 aa, synthetic construct
MFSAY

SEQ ID NO: 3938 - protein, 5 aa, synthetic construct
GVRTT

SEQ ID NO: 3939 - protein, 5 aa, synthetic construct
QAGHY

SEQ ID NO: 3940 - protein, 5 aa, synthetic construct
TRVDY

SEQ ID NO: 3941 - protein, 5 aa, synthetic construct
GRTLD

SEQ ID NO: 3942 - protein, 5 aa, synthetic construct
GCRVD

SEQ ID NO: 3943 - protein, 5 aa, synthetic construct
GQCMF

SEQ ID NO: 3944 - protein, 5 aa, synthetic construct
GARQY

SEQ ID NO: 3945 - protein, 5 aa, synthetic construct
GLRLI

SEQ ID NO: 3946 - protein, 5 aa, synthetic construct
GFHTE

SEQ ID NO: 3947 - protein, 5 aa, synthetic construct
GFDVY

SEQ ID NO: 3948 - protein, 5 aa, synthetic construct
GGFWV

SEQ ID NO: 3949 - protein, 5 aa, synthetic construct
GFGGD

SEQ ID NO: 3950 - protein, 5 aa, synthetic construct
GRLEY

SEQ ID NO: 3951 - protein, 5 aa, synthetic construct
GFRGD

SEQ ID NO: 3952 - protein, 5 aa, synthetic construct
GQGVY

SEQ ID NO: 3953 - protein, 5 aa, synthetic construct
VRTNG

SEQ ID NO: 3954 - protein, 5 aa, synthetic construct
VRSID

SEQ ID NO: 3955 - protein, 5 aa, synthetic construct
VQGFM

SEQ ID NO: 3956 - protein, 5 aa, synthetic construct
DVAGI

SEQ ID NO: 3957 - protein, 5 aa, synthetic construct
GFRCY

SEQ ID NO: 3958 - protein, 4 aa, synthetic construct
YNQY

SEQ ID NO: 3959 - protein, 5 aa, synthetic construct
GGVHM

SEQ ID NO: 3960 - protein, 5 aa, synthetic construct
GHGSY

SEQ ID NO: 3961 - protein, 5 aa, synthetic construct
RHNVY

SEQ ID NO: 3962 - protein, 5 aa, synthetic construct
GIGNY

SEQ ID NO: 3963 - protein, 5 aa, synthetic construct
GIGWA

SEQ ID NO: 3964 - protein, 5 aa, synthetic construct
GRNNG

SEQ ID NO: 3965 - protein, 5 aa, synthetic construct
AREAY

SEQ ID NO: 3966 - protein, 5 aa, synthetic construct
GIDNN

SEQ ID NO: 3967 - protein, 5 aa, synthetic construct
SARKD

SEQ ID NO: 3968 - protein, 5 aa, synthetic construct
YGMNY

SEQ ID NO: 3969 - protein, 5 aa, synthetic construct
GSTSY

SEQ ID NO: 3970 - protein, 5 aa, synthetic construct
VRHLM

SEQ ID NO: 3971 - protein, 5 aa, synthetic construct
GTSLY

SEQ ID NO: 3972 - protein, 5 aa, synthetic construct
GHSVY

SEQ ID NO: 3973 - protein, 5 aa, synthetic construct
GFQFN

SEQ ID NO: 3974 - protein, 4 aa, synthetic construct
CALW

SEQ ID NO: 3975 - protein, 5 aa, synthetic construct
VRDGY

SEQ ID NO: 3976 - protein, 5 aa, synthetic construct
DHGSY

SEQ ID NO: 3977 - protein, 5 aa, synthetic construct
QRERA

SEQ ID NO: 3978 - protein, 5 aa, synthetic construct
MPGEH

SEQ ID NO: 3979 - protein, 5 aa, synthetic construct
GVETY

SEQ ID NO: 3980 - protein, 5 aa, synthetic construct
GRGHP

SEQ ID NO: 3981 - protein, 5 aa, synthetic construct
MRMEY

SEQ ID NO: 3982 - protein, 5 aa, synthetic construct
ARDTY

SEQ ID NO: 3983 - protein, 5 aa, synthetic construct
SNNGY

SEQ ID NO: 3984 - protein, 4 aa, synthetic construct
LDTF

SEQ ID NO: 3985 - protein, 5 aa, synthetic construct
IMRVY

SEQ ID NO: 3986 - protein, 5 aa, synthetic construct
GTEGL

SEQ ID NO: 3987 - protein, 5 aa, synthetic construct
ATLRY

SEQ ID NO: 3988 - protein, 5 aa, synthetic construct
GYGNY

SEQ ID NO: 3989 - protein, 5 aa, synthetic construct
GDAWY

SEQ ID NO: 3990 - protein, 5 aa, synthetic construct
GQVLY

SEQ ID NO: 3991 - protein, 5 aa, synthetic construct
TNSHY

SEQ ID NO: 3992 - protein, 5 aa, synthetic construct
GQSDY

SEQ ID NO: 3993 - protein, 5 aa, synthetic construct
EFHER

SEQ ID NO: 3994 - protein, 5 aa, synthetic construct
GAGFY

SEQ ID NO: 3995 - protein, 5 aa, synthetic construct
GVASY

SEQ ID NO: 3996 - protein, 5 aa, synthetic construct
GFKEL

SEQ ID NO: 3997 - protein, 5 aa, synthetic construct
TARAY

SEQ ID NO: 3998 - protein, 5 aa, synthetic construct
GGAVY

SEQ ID NO: 3999 - protein, 5 aa, synthetic construct
GQNTY

SEQ ID NO: 4000 - protein, 5 aa, synthetic construct
GMETM

SEQ ID NO: 4001 - protein, 5 aa, synthetic construct
GMSLY

SEQ ID NO: 4002 - protein, 5 aa, synthetic construct
GSATY

SEQ ID NO: 4003 - protein, 5 aa, synthetic construct
GWRTD

SEQ ID NO: 4004 - protein, 5 aa, synthetic construct
VNQAY

SEQ ID NO: 4005 - protein, 4 aa, synthetic construct
NRSD

SEQ ID NO: 4006 - protein, 5 aa, synthetic construct
GFNYR

SEQ ID NO: 4007 - protein, 5 aa, synthetic construct
LRESY

SEQ ID NO: 4008 - protein, 5 aa, synthetic construct
NYKDA

SEQ ID NO: 4009 - protein, 5 aa, synthetic construct
KMHVY

SEQ ID NO: 4010 - protein, 5 aa, synthetic construct
GKNEY

SEQ ID NO: 4011 - protein, 5 aa, synthetic construct
GRSTY

SEQ ID NO: 4012 - protein, 5 aa, synthetic construct
GFLGV

SEQ ID NO: 4013 - protein, 5 aa, synthetic construct
SQGAS

SEQ ID NO: 4014 - protein, 5 aa, synthetic construct
GGVDY

SEQ ID NO: 4015 - protein, 5 aa, synthetic construct
TFGSY

SEQ ID NO: 4016 - protein, 5 aa, synthetic construct
FGTPY

SEQ ID NO: 4017 - protein, 5 aa, synthetic construct
GRLTF

SEQ ID NO: 4018 - protein, 5 aa, synthetic construct
GEVQR

SEQ ID NO: 4019 - protein, 5 aa, synthetic construct
ATNLY

SEQ ID NO: 4020 - protein, 5 aa, synthetic construct
GWSWY

SEQ ID NO: 4021 - protein, 5 aa, synthetic construct
GRVQY

SEQ ID NO: 4022 - protein, 5 aa, synthetic construct
GFGSQ

SEQ ID NO: 4023 - protein, 5 aa, synthetic construct
GLRSY

SEQ ID NO: 4024 - protein, 5 aa, synthetic construct
GFRLM

SEQ ID NO: 4025 - protein, 5 aa, synthetic construct
GGDSG

SEQ ID NO: 4026 - protein, 5 aa, synthetic construct
GFGHI

SEQ ID NO: 4027 - protein, 5 aa, synthetic construct
GHSSY

SEQ ID NO: 4028 - protein, 5 aa, synthetic construct
GFQNI

SEQ ID NO: 4029 - protein, 5 aa, synthetic construct
GVRCY

SEQ ID NO: 4030 - protein, 5 aa, synthetic construct
GVSNY

SEQ ID NO: 4031 - protein, 5 aa, synthetic construct
STATY

SEQ ID NO: 4032 - protein, 5 aa, synthetic construct
GFGAV

SEQ ID NO: 4033 - protein, 5 aa, synthetic construct
GSASG

SEQ ID NO: 4034 - protein, 5 aa, synthetic construct
VPLER

SEQ ID NO: 4035 - protein, 5 aa, synthetic construct
GFGYT

SEQ ID NO: 4036 - protein, 5 aa, synthetic construct
GSSAY

SEQ ID NO: 4037 - protein, 5 aa, synthetic construct
FRTEY

SEQ ID NO: 4038 - protein, 5 aa, synthetic construct
GFQVY

SEQ ID NO: 4039 - protein, 5 aa, synthetic construct
DRGPY

SEQ ID NO: 4040 - protein, 5 aa, synthetic construct
YMYAY

SEQ ID NO: 4041 - protein, 5 aa, synthetic construct
GGDRY

SEQ ID NO: 4042 - protein, 5 aa, synthetic construct
GARRY

SEQ ID NO: 4043 - protein, 5 aa, synthetic construct
RLQDY

SEQ ID NO: 4044 - protein, 5 aa, synthetic construct
RQSGD

SEQ ID NO: 4045 - protein, 5 aa, synthetic construct
CHQVY

SEQ ID NO: 4046 - protein, 5 aa, synthetic construct
GAHSV

SEQ ID NO: 4047 - protein, 5 aa, synthetic construct
GLRGH

SEQ ID NO: 4048 - protein, 5 aa, synthetic construct
MRQVY

SEQ ID NO: 4049 - protein, 5 aa, synthetic construct
GFSLE

SEQ ID NO: 4050 - protein, 5 aa, synthetic construct
VSDCL

SEQ ID NO: 4051 - protein, 5 aa, synthetic construct
CAHDG

SEQ ID NO: 4052 - protein, 5 aa, synthetic construct
AHAAA

SEQ ID NO: 4053 - protein, 5 aa, synthetic construct
RRSDY

SEQ ID NO: 4054 - protein, 5 aa, synthetic construct
GRSLY

SEQ ID NO: 4055 - protein, 5 aa, synthetic construct
GHGAY

SEQ ID NO: 4056 - protein, 5 aa, synthetic construct
GQHSG

SEQ ID NO: 4057 - protein, 5 aa, synthetic construct
MNGMY

SEQ ID NO: 4058 - protein, 5 aa, synthetic construct
GAGYM

SEQ ID NO: 4059 - protein, 5 aa, synthetic construct
GQGRL

SEQ ID NO: 4060 - protein, 5 aa, synthetic construct
GQRAY

SEQ ID NO: 4061 - protein, 5 aa, synthetic construct
GTNSY

SEQ ID NO: 4062 - protein, 5 aa, synthetic construct
KRNQY

SEQ ID NO: 4063 - protein, 5 aa, synthetic construct
WRYLR

SEQ ID NO: 4064 - protein, 5 aa, synthetic construct
GAGWY

SEQ ID NO: 4065 - protein, 5 aa, synthetic construct
HVSEY

SEQ ID NO: 4066 - protein, 5 aa, synthetic construct
GTHRY

SEQ ID NO: 4067 - protein, 5 aa, synthetic construct
GKLIY

SEQ ID NO: 4068 - protein, 5 aa, synthetic construct
MGTMY

SEQ ID NO: 4069 - protein, 5 aa, synthetic construct
ASRAY

SEQ ID NO: 4070 - protein, 5 aa, synthetic construct
YERLS

SEQ ID NO: 4071 - protein, 5 aa, synthetic construct
GYLEY

SEQ ID NO: 4072 - protein, 5 aa, synthetic construct
KIGTY

SEQ ID NO: 4073 - protein, 5 aa, synthetic construct
VLRSY

SEQ ID NO: 4074 - protein, 5 aa, synthetic construct
TGHLY

SEQ ID NO: 4075 - protein, 5 aa, synthetic construct
IVHHL

SEQ ID NO: 4076 - protein, 5 aa, synthetic construct
ARSGV

SEQ ID NO: 4077 - protein, 5 aa, synthetic construct
STCSD

SEQ ID NO: 4078 - protein, 5 aa, synthetic construct
NNGSY

SEQ ID NO: 4079 - protein, 5 aa, synthetic construct
HSGRL

SEQ ID NO: 4080 - protein, 5 aa, synthetic construct
GKGAS

SEQ ID NO: 4081 - protein, 5 aa, synthetic construct
RTGEY

SEQ ID NO: 4082 - protein, 5 aa, synthetic construct
RMNQE

SEQ ID NO: 4083 - protein, 5 aa, synthetic construct
EVDRF

SEQ ID NO: 4084 - protein, 5 aa, synthetic construct
SRIVY

SEQ ID NO: 4085 - protein, 5 aa, synthetic construct
GSAVA

SEQ ID NO: 4086 - protein, 5 aa, synthetic construct
GSRKY

SEQ ID NO: 4087 - protein, 4 aa, synthetic construct
WDVL

SEQ ID NO: 4088 - protein, 5 aa, synthetic construct
EGGVY

SEQ ID NO: 4089 - protein, 5 aa, synthetic construct
RLHSG

SEQ ID NO: 4090 - protein, 5 aa, synthetic construct
GDIRY

SEQ ID NO: 4091 - protein, 5 aa, synthetic construct
VMRDY

SEQ ID NO: 4092 - protein, 5 aa, synthetic construct
DSSIY

SEQ ID NO: 4093 - protein, 5 aa, synthetic construct
GSNAL

SEQ ID NO: 4094 - protein, 5 aa, synthetic construct
MNWVY

SEQ ID NO: 4095 - protein, 5 aa, synthetic construct
KAKEY

SEQ ID NO: 4096 - protein, 5 aa, synthetic construct
RRTDG

SEQ ID NO: 4097 - protein, 5 aa, synthetic construct
VRGIY

SEQ ID NO: 4098 - protein, 5 aa, synthetic construct
GMTAY

SEQ ID NO: 4099 - protein, 5 aa, synthetic construct
GRNHY

SEQ ID NO: 4100 - protein, 5 aa, synthetic construct
GMGSY

SEQ ID NO: 4101 - protein, 5 aa, synthetic construct
GLYGS

SEQ ID NO: 4102 - protein, 5 aa, synthetic construct
VRDGN

SEQ ID NO: 4103 - protein, 5 aa, synthetic construct
VPRAY

SEQ ID NO: 4104 - protein, 5 aa, synthetic construct
FSALF

SEQ ID NO: 4105 - protein, 5 aa, synthetic construct
MGKVY

SEQ ID NO: 4106 - protein, 5 aa, synthetic construct
VSHQG

SEQ ID NO: 4107 - protein, 5 aa, synthetic construct
VGTTH

SEQ ID NO: 4108 - protein, 5 aa, synthetic construct
GTTAM

SEQ ID NO: 4109 - protein, 5 aa, synthetic construct
GLSTY

SEQ ID NO: 4110 - protein, 5 aa, synthetic construct
GFGLG

SEQ ID NO: 4111 - protein, 5 aa, synthetic construct
NSSAL

SEQ ID NO: 4112 - protein, 5 aa, synthetic construct
GFHLD

SEQ ID NO: 4113 - protein, 5 aa, synthetic construct
YGSTY

SEQ ID NO: 4114 - protein, 5 aa, synthetic construct
TRMDY

SEQ ID NO: 4115 - protein, 5 aa, synthetic construct
IYSGV

SEQ ID NO: 4116 - protein, 5 aa, synthetic construct
GLDRL

SEQ ID NO: 4117 - protein, 5 aa, synthetic construct
VVRGD

SEQ ID NO: 4118 - protein, 5 aa, synthetic construct
GCGDS

SEQ ID NO: 4119 - protein, 5 aa, synthetic construct
GVGWR

SEQ ID NO: 4120 - protein, 5 aa, synthetic construct
MRGQY

SEQ ID NO: 4121 - protein, 5 aa, synthetic construct
GSAAL

SEQ ID NO: 4122 - protein, 5 aa, synthetic construct
YAHRL

SEQ ID NO: 4123 - protein, 5 aa, synthetic construct
RVRNY

SEQ ID NO: 4124 - protein, 5 aa, synthetic construct
RSTDY

SEQ ID NO: 4125 - protein, 5 aa, synthetic construct
DMLAY

SEQ ID NO: 4126 - protein, 5 aa, synthetic construct
GRGST

SEQ ID NO: 4127 - protein, 5 aa, synthetic construct
GNLAY

SEQ ID NO: 4128 - protein, 5 aa, synthetic construct
IGTSG

SEQ ID NO: 4129 - protein, 5 aa, synthetic construct
GSTAY

SEQ ID NO: 4130 - protein, 5 aa, synthetic construct
GTTVG

SEQ ID NO: 4131 - protein, 4 aa, synthetic construct
GANG

SEQ ID NO: 4132 - protein, 5 aa, synthetic construct
NVHGY

SEQ ID NO: 4133 - protein, 5 aa, synthetic construct
VRNTY

SEQ ID NO: 4134 - protein, 5 aa, synthetic construct
TNGVY

SEQ ID NO: 4135 - protein, 5 aa, synthetic construct
AHGVV

SEQ ID NO: 4136 - protein, 5 aa, synthetic construct
IRTHI

SEQ ID NO: 4137 - protein, 5 aa, synthetic construct
ASVGN

SEQ ID NO: 4138 - protein, 5 aa, synthetic construct
GNSDY

SEQ ID NO: 4139 - protein, 5 aa, synthetic construct
GMECY

SEQ ID NO: 4140 - protein, 4 aa, synthetic construct
RNVY

SEQ ID NO: 4141 - protein, 5 aa, synthetic construct
GRGSE

SEQ ID NO: 4142 - protein, 5 aa, synthetic construct
LMSAY

SEQ ID NO: 4143 - protein, 5 aa, synthetic construct
GGVRY

SEQ ID NO: 4144 - protein, 4 aa, synthetic construct
RMDW

SEQ ID NO: 4145 - protein, 4 aa, synthetic construct
HSGR

SEQ ID NO: 4146 - protein, 5 aa, synthetic construct
GFHFL

SEQ ID NO: 4147 - protein, 5 aa, synthetic construct
TRDDL

SEQ ID NO: 4148 - protein, 5 aa, synthetic construct
FSQHA

SEQ ID NO: 4149 - protein, 5 aa, synthetic construct
GTGFY

SEQ ID NO: 4150 - protein, 5 aa, synthetic construct
KDGEY

SEQ ID NO: 4151 - protein, 5 aa, synthetic construct
GVAQY

SEQ ID NO: 4152 - protein, 5 aa, synthetic construct
GGGTY

SEQ ID NO: 4153 - protein, 5 aa, synthetic construct
GNTTY

SEQ ID NO: 4154 - protein, 5 aa, synthetic construct
DAAFY

SEQ ID NO: 4155 - protein, 5 aa, synthetic construct
GVRGY

SEQ ID NO: 4156 - protein, 5 aa, synthetic construct
GFHED

SEQ ID NO: 4157 - protein, 5 aa, synthetic construct
DFRGV

SEQ ID NO: 4158 - protein, 5 aa, synthetic construct
GFTEY

SEQ ID NO: 4159 - protein, 5 aa, synthetic construct
GNCTY

SEQ ID NO: 4160 - protein, 5 aa, synthetic construct
TLTAV

SEQ ID NO: 4161 - protein, 5 aa, synthetic construct
VRSLG

SEQ ID NO: 4162 - protein, 5 aa, synthetic construct
FAHGF

SEQ ID NO: 4163 - protein, 5 aa, synthetic construct
GMKLY

SEQ ID NO: 4164 - protein, 5 aa, synthetic construct
GEWSG

SEQ ID NO: 4165 - protein, 5 aa, synthetic construct
EGSQY

SEQ ID NO: 4166 - protein, 5 aa, synthetic construct
GHGRY

SEQ ID NO: 4167 - protein, 5 aa, synthetic construct
VRTIY

SEQ ID NO: 4168 - protein, 5 aa, synthetic construct
VSVLY

SEQ ID NO: 4169 - protein, 5 aa, synthetic construct
VVSVD

SEQ ID NO: 4170 - protein, 5 aa, synthetic construct
VVNEY

SEQ ID NO: 4171 - protein, 5 aa, synthetic construct
SPLPM

SEQ ID NO: 4172 - protein, 5 aa, synthetic construct
KHPIG

SEQ ID NO: 4173 - protein, 5 aa, synthetic construct
LLGSY

SEQ ID NO: 4174 - protein, 5 aa, synthetic construct
GFHLA

SEQ ID NO: 4175 - protein, 5 aa, synthetic construct
GFGGM

SEQ ID NO: 4176 - protein, 5 aa, synthetic construct
GNHTY

SEQ ID NO: 4177 - protein, 5 aa, synthetic construct
GFRTR

SEQ ID NO: 4178 - protein, 5 aa, synthetic construct
GHAMY

SEQ ID NO: 4179 - protein, 5 aa, synthetic construct
GGCDY

SEQ ID NO: 4180 - protein, 5 aa, synthetic construct
MRHGG

SEQ ID NO: 4181 - protein, 5 aa, synthetic construct
VHQDY

SEQ ID NO: 4182 - protein, 5 aa, synthetic construct
TGRFY

SEQ ID NO: 4183 - protein, 5 aa, synthetic construct
VRGCY

SEQ ID NO: 4184 - protein, 5 aa, synthetic construct
GGVLY

SEQ ID NO: 4185 - protein, 5 aa, synthetic construct
GRMIY

SEQ ID NO: 4186 - protein, 5 aa, synthetic construct
GRGEY

SEQ ID NO: 4187 - protein, 5 aa, synthetic construct
GVTAH

SEQ ID NO: 4188 - protein, 5 aa, synthetic construct
VRMGV

SEQ ID NO: 4189 - protein, 5 aa, synthetic construct
ENVSY

SEQ ID NO: 4190 - protein, 5 aa, synthetic construct
GMNAG

SEQ ID NO: 4191 - protein, 5 aa, synthetic construct
GRLVY

SEQ ID NO: 4192 - protein, 5 aa, synthetic construct
GTHVG

SEQ ID NO: 4193 - protein, 5 aa, synthetic construct
GARGI

SEQ ID NO: 4194 - protein, 5 aa, synthetic construct
GALVY

SEQ ID NO: 4195 - protein, 5 aa, synthetic construct
GFRNL

SEQ ID NO: 4196 - protein, 5 aa, synthetic construct
LYTVY

SEQ ID NO: 4197 - protein, 5 aa, synthetic construct
SAHMY

SEQ ID NO: 4198 - protein, 5 aa, synthetic construct
SSDVY

SEQ ID NO: 4199 - protein, 5 aa, synthetic construct
MRSVY

SEQ ID NO: 4200 - protein, 5 aa, synthetic construct
WRGTM

SEQ ID NO: 4201 - protein, 5 aa, synthetic construct
GNGRY

SEQ ID NO: 4202 - protein, 5 aa, synthetic construct
VNALY

SEQ ID NO: 4203 - protein, 5 aa, synthetic construct
GDSTY

SEQ ID NO: 4204 - protein, 5 aa, synthetic construct
GVSAD

SEQ ID NO: 4205 - protein, 5 aa, synthetic construct
MMGQY

SEQ ID NO: 4206 - protein, 5 aa, synthetic construct
GRLLD

SEQ ID NO: 4207 - protein, 5 aa, synthetic construct
HNSVG

SEQ ID NO: 4208 - protein, 5 aa, synthetic construct
GRSSY

SEQ ID NO: 4209 - protein, 5 aa, synthetic construct
VRDAL

SEQ ID NO: 4210 - protein, 5 aa, synthetic construct
ATSVY

SEQ ID NO: 4211 - protein, 5 aa, synthetic construct
SVNFS

SEQ ID NO: 4212 - protein, 5 aa, synthetic construct
TDLGY

SEQ ID NO: 4213 - protein, 5 aa, synthetic construct
ASDGG

SEQ ID NO: 4214 - protein, 5 aa, synthetic construct
RMGSY

SEQ ID NO: 4215 - protein, 4 aa, synthetic construct
SVNR

SEQ ID NO: 4216 - protein, 5 aa, synthetic construct
GHGGV

SEQ ID NO: 4217 - protein, 5 aa, synthetic construct
GNDSA

SEQ ID NO: 4218 - protein, 5 aa, synthetic construct
SDVHY

SEQ ID NO: 4219 - protein, 5 aa, synthetic construct
CDTGH

SEQ ID NO: 4220 - protein, 5 aa, synthetic construct
GTLLY

SEQ ID NO: 4221 - protein, 5 aa, synthetic construct
GTKVY

SEQ ID NO: 4222 - protein, 5 aa, synthetic construct
GVDTY

SEQ ID NO: 4223 - protein, 5 aa, synthetic construct
MLRRY

SEQ ID NO: 4224 - protein, 5 aa, synthetic construct
VHMDY

SEQ ID NO: 4225 - protein, 5 aa, synthetic construct
GRTSY

SEQ ID NO: 4226 - protein, 5 aa, synthetic construct
ADSRY

SEQ ID NO: 4227 - protein, 5 aa, synthetic construct
VNDVG

SEQ ID NO: 4228 - protein, 5 aa, synthetic construct
PHRLY

SEQ ID NO: 4229 - protein, 4 aa, synthetic construct
ASGW

SEQ ID NO: 4230 - protein, 5 aa, synthetic construct
VSCHY

SEQ ID NO: 4231 - protein, 5 aa, synthetic construct
GRSKL

SEQ ID NO: 4232 - protein, 5 aa, synthetic construct
EKDRL

SEQ ID NO: 4233 - protein, 5 aa, synthetic construct
VWHGW

SEQ ID NO: 4234 - protein, 5 aa, synthetic construct
GNRFY

SEQ ID NO: 4235 - protein, 5 aa, synthetic construct
VRFGD

SEQ ID NO: 4236 - protein, 5 aa, synthetic construct
GDTIY

SEQ ID NO: 4237 - protein, 5 aa, synthetic construct
GFNGV

SEQ ID NO: 4238 - protein, 5 aa, synthetic construct
KSVGY

SEQ ID NO: 4239 - protein, 5 aa, synthetic construct
VEDDY

SEQ ID NO: 4240 - protein, 5 aa, synthetic construct
VRYAW

SEQ ID NO: 4241 - protein, 5 aa, synthetic construct
GRSET

SEQ ID NO: 4242 - protein, 5 aa, synthetic construct
GVLNV

SEQ ID NO: 4243 - protein, 5 aa, synthetic construct
IVRGS

SEQ ID NO: 4244 - protein, 5 aa, synthetic construct
DRERY

SEQ ID NO: 4245 - protein, 5 aa, synthetic construct
YMYGM

SEQ ID NO: 4246 - protein, 5 aa, synthetic construct
TRSVY

SEQ ID NO: 4247 - protein, 5 aa, synthetic construct
MANFT

SEQ ID NO: 4248 - protein, 5 aa, synthetic construct
VRTMY

SEQ ID NO: 4249 - protein, 5 aa, synthetic construct
MIGVY

SEQ ID NO: 4250 - protein, 5 aa, synthetic construct
GHTRY

SEQ ID NO: 4251 - protein, 5 aa, synthetic construct
GAKGW

SEQ ID NO: 4252 - protein, 5 aa, synthetic construct
NRGGG

SEQ ID NO: 4253 - protein, 5 aa, synthetic construct
GVSMY

SEQ ID NO: 4254 - protein, 5 aa, synthetic construct
ASVLY

SEQ ID NO: 4255 - protein, 5 aa, synthetic construct
YRYDQ

SEQ ID NO: 4256 - protein, 5 aa, synthetic construct
ANHRG

SEQ ID NO: 4257 - protein, 5 aa, synthetic construct
DVVEM

SEQ ID NO: 4258 - protein, 5 aa, synthetic construct
DFRDS

SEQ ID NO: 4259 - protein, 5 aa, synthetic construct
TVGAD

SEQ ID NO: 4260 - protein, 5 aa, synthetic construct
GFCDY

SEQ ID NO: 4261 - protein, 5 aa, synthetic construct
ARSGG

SEQ ID NO: 4262 - protein, 5 aa, synthetic construct
GRKVY

SEQ ID NO: 4263 - protein, 5 aa, synthetic construct
SRERY

SEQ ID NO: 4264 - protein, 5 aa, synthetic construct
GDSEY

SEQ ID NO: 4265 - protein, 5 aa, synthetic construct
FSHDA

SEQ ID NO: 4266 - protein, 5 aa, synthetic construct
WTWQE

SEQ ID NO: 4267 - protein, 5 aa, synthetic construct
GITVA

SEQ ID NO: 4268 - protein, 5 aa, synthetic construct
IRRGC

SEQ ID NO: 4269 - protein, 5 aa, synthetic construct
GTRCS

SEQ ID NO: 4270 - protein, 5 aa, synthetic construct
ARWCY

SEQ ID NO: 4271 - protein, 5 aa, synthetic construct
NGVGY

SEQ ID NO: 4272 - protein, 5 aa, synthetic construct
VHRNY

SEQ ID NO: 4273 - protein, 5 aa, synthetic construct
GVRGQ

SEQ ID NO: 4274 - protein, 5 aa, synthetic construct
GRGMA

SEQ ID NO: 4275 - protein, 5 aa, synthetic construct
GFHSA

SEQ ID NO: 4276 - protein, 5 aa, synthetic construct
DGHLV

SEQ ID NO: 4277 - protein, 5 aa, synthetic construct
GTNGV

SEQ ID NO: 4278 - protein, 5 aa, synthetic construct
RLYVY

SEQ ID NO: 4279 - protein, 5 aa, synthetic construct
TQRIY

SEQ ID NO: 4280 - protein, 5 aa, synthetic construct
GVREY

SEQ ID NO: 4281 - protein, 5 aa, synthetic construct
HSVGY

SEQ ID NO: 4282 - protein, 5 aa, synthetic construct
GDRMY

SEQ ID NO: 4283 - protein, 5 aa, synthetic construct
SRDSE

SEQ ID NO: 4284 - protein, 5 aa, synthetic construct
VTQEY

SEQ ID NO: 4285 - protein, 5 aa, synthetic construct
MHKRY

SEQ ID NO: 4286 - protein, 5 aa, synthetic construct
GIGDE

SEQ ID NO: 4287 - protein, 5 aa, synthetic construct
VRGVY

SEQ ID NO: 4288 - protein, 5 aa, synthetic construct
NSDHY

SEQ ID NO: 4289 - protein, 5 aa, synthetic construct
WRGFY

SEQ ID NO: 4290 - protein, 5 aa, synthetic construct
GGQRY

SEQ ID NO: 4291 - protein, 5 aa, synthetic construct
GYRES

SEQ ID NO: 4292 - protein, 5 aa, synthetic construct
VVGLY

SEQ ID NO: 4293 - protein, 5 aa, synthetic construct
GISLY

SEQ ID NO: 4294 - protein, 5 aa, synthetic construct
GLGRY

SEQ ID NO: 4295 - protein, 5 aa, synthetic construct
GAGQY

SEQ ID NO: 4296 - protein, 5 aa, synthetic construct
KTLLY

SEQ ID NO: 4297 - protein, 5 aa, synthetic construct
CQVYY

SEQ ID NO: 4298 - protein, 5 aa, synthetic construct
VVGWY

SEQ ID NO: 4299 - protein, 5 aa, synthetic construct
GFGIY

SEQ ID NO: 4300 - protein, 5 aa, synthetic construct
GGALY

SEQ ID NO: 4301 - protein, 5 aa, synthetic construct
MRMTY

SEQ ID NO: 4302 - protein, 5 aa, synthetic construct
SMNAY

SEQ ID NO: 4303 - protein, 5 aa, synthetic construct
MRMVE

SEQ ID NO: 4304 - protein, 5 aa, synthetic construct
ETGAY

SEQ ID NO: 4305 - protein, 5 aa, synthetic construct
WGCGY

SEQ ID NO: 4306 - protein, 5 aa, synthetic construct
WLRCE

SEQ ID NO: 4307 - protein, 5 aa, synthetic construct
RVGTY

SEQ ID NO: 4308 - protein, 5 aa, synthetic construct
MIDGG

SEQ ID NO: 4309 - protein, 5 aa, synthetic construct
LGGHY

SEQ ID NO: 4310 - protein, 5 aa, synthetic construct
VNSTY

SEQ ID NO: 4311 - protein, 5 aa, synthetic construct
AGVNY

SEQ ID NO: 4312 - protein, 5 aa, synthetic construct
GKSDH

SEQ ID NO: 4313 - protein, 5 aa, synthetic construct
MRMIY

SEQ ID NO: 4314 - protein, 5 aa, synthetic construct
KHMRS

SEQ ID NO: 4315 - protein, 5 aa, synthetic construct
VRFYA

SEQ ID NO: 4316 - protein, 5 aa, synthetic construct
NWNAL

SEQ ID NO: 4317 - protein, 5 aa, synthetic construct
GRSHA

SEQ ID NO: 4318 - protein, 5 aa, synthetic construct
VRFNY

SEQ ID NO: 4319 - protein, 5 aa, synthetic construct
GFGLC

SEQ ID NO: 4320 - protein, 5 aa, synthetic construct
GHYAY

SEQ ID NO: 4321 - protein, 5 aa, synthetic construct
GGHAY

SEQ ID NO: 4322 - protein, 5 aa, synthetic construct
VSDSY

SEQ ID NO: 4323 - protein, 5 aa, synthetic construct
GQKQY

SEQ ID NO: 4324 - protein, 5 aa, synthetic construct
GKDFS

SEQ ID NO: 4325 - protein, 5 aa, synthetic construct
AVRAY

SEQ ID NO: 4326 - protein, 5 aa, synthetic construct
NSMLY

SEQ ID NO: 4327 - protein, 5 aa, synthetic construct
YGPTG

SEQ ID NO: 4328 - protein, 5 aa, synthetic construct
AVPGY

SEQ ID NO: 4329 - protein, 5 aa, synthetic construct
GRAAY

SEQ ID NO: 4330 - protein, 5 aa, synthetic construct
KRLAD

SEQ ID NO: 4331 - protein, 5 aa, synthetic construct
RRVVY

SEQ ID NO: 4332 - protein, 5 aa, synthetic construct
GKTGA

SEQ ID NO: 4333 - protein, 5 aa, synthetic construct
LKRYD

SEQ ID NO: 4334 - protein, 5 aa, synthetic construct
RVVHY

SEQ ID NO: 4335 - protein, 5 aa, synthetic construct
SRQAY

SEQ ID NO: 4336 - protein, 5 aa, synthetic construct
GFRVV

SEQ ID NO: 4337 - protein, 5 aa, synthetic construct
GFGSL

SEQ ID NO: 4338 - protein, 5 aa, synthetic construct
ACHRY

SEQ ID NO: 4339 - protein, 5 aa, synthetic construct
GRHVY

SEQ ID NO: 4340 - protein, 5 aa, synthetic construct
MRMAY

SEQ ID NO: 4341 - protein, 5 aa, synthetic construct
GHCTY

SEQ ID NO: 4342 - protein, 5 aa, synthetic construct
GIRRV

SEQ ID NO: 4343 - protein, 5 aa, synthetic construct
RSGHY

SEQ ID NO: 4344 - protein, 5 aa, synthetic construct
CTTGV

SEQ ID NO: 4345 - protein, 5 aa, synthetic construct
IRRAY

SEQ ID NO: 4346 - protein, 5 aa, synthetic construct
CLGTY

SEQ ID NO: 4347 - protein, 5 aa, synthetic construct
GQRLY

SEQ ID NO: 4348 - protein, 5 aa, synthetic construct
DKEAI

SEQ ID NO: 4349 - protein, 5 aa, synthetic construct
ARSMY

SEQ ID NO: 4350 - protein, 5 aa, synthetic construct
INWQY

SEQ ID NO: 4351 - protein, 5 aa, synthetic construct
GVTVY

SEQ ID NO: 4352 - protein, 5 aa, synthetic construct
YTRMY

SEQ ID NO: 4353 - protein, 5 aa, synthetic construct
MRAVY

SEQ ID NO: 4354 - protein, 4 aa, synthetic construct
KVVS

SEQ ID NO: 4355 - protein, 5 aa, synthetic construct
TRVHY

SEQ ID NO: 4356 - protein, 5 aa, synthetic construct
RTHTY

SEQ ID NO: 4357 - protein, 5 aa, synthetic construct
GTINY

SEQ ID NO: 4358 - protein, 5 aa, synthetic construct
DGLNF

SEQ ID NO: 4359 - protein, 5 aa, synthetic construct
TAWAT

SEQ ID NO: 4360 - protein, 5 aa, synthetic construct
GVIGC

SEQ ID NO: 4361 - protein, 5 aa, synthetic construct
GQSEY

SEQ ID NO: 4362 - protein, 5 aa, synthetic construct
ARVAY

SEQ ID NO: 4363 - protein, 5 aa, synthetic construct
GFGQY

SEQ ID NO: 4364 - protein, 5 aa, synthetic construct
VRQAY

SEQ ID NO: 4365 - protein, 5 aa, synthetic construct
GHGLT

SEQ ID NO: 4366 - protein, 5 aa, synthetic construct
TANGD

SEQ ID NO: 4367 - protein, 5 aa, synthetic construct
GEVSY

SEQ ID NO: 4368 - protein, 5 aa, synthetic construct
GNGVY

SEQ ID NO: 4369 - protein, 5 aa, synthetic construct
MMRNW

SEQ ID NO: 4370 - protein, 5 aa, synthetic construct
GSSGG

SEQ ID NO: 4371 - protein, 5 aa, synthetic construct
HRIGE

SEQ ID NO: 4372 - protein, 5 aa, synthetic construct
NRIGA

SEQ ID NO: 4373 - protein, 5 aa, synthetic construct
CMQGR

SEQ ID NO: 4374 - protein, 5 aa, synthetic construct
ALREY

SEQ ID NO: 4375 - protein, 5 aa, synthetic construct
GMDAS

SEQ ID NO: 4376 - protein, 4 aa, synthetic construct
RELL

SEQ ID NO: 4377 - protein, 5 aa, synthetic construct
GFRGE

SEQ ID NO: 4378 - protein, 5 aa, synthetic construct
NNVIY

SEQ ID NO: 4379 - protein, 5 aa, synthetic construct
GFGRS

SEQ ID NO: 4380 - protein, 5 aa, synthetic construct
MAGYY

SEQ ID NO: 4381 - protein, 5 aa, synthetic construct
ATHVG

SEQ ID NO: 4382 - protein, 5 aa, synthetic construct
AVQRV

SEQ ID NO: 4383 - protein, 5 aa, synthetic construct
STSSY

SEQ ID NO: 4384 - protein, 5 aa, synthetic construct
GTHSY

SEQ ID NO: 4385 - protein, 5 aa, synthetic construct
GTRFY

SEQ ID NO: 4386 - protein, 5 aa, synthetic construct
GIGCY

SEQ ID NO: 4387 - protein, 5 aa, synthetic construct
CQSNY

SEQ ID NO: 4388 - protein, 5 aa, synthetic construct
GRNDA

SEQ ID NO: 4389 - protein, 5 aa, synthetic construct
VSRGL

SEQ ID NO: 4390 - protein, 5 aa, synthetic construct
RVVDY

SEQ ID NO: 4391 - protein, 5 aa, synthetic construct
VKAGV

SEQ ID NO: 4392 - protein, 5 aa, synthetic construct
VMLIQ

SEQ ID NO: 4393 - protein, 5 aa, synthetic construct
GSTTY

SEQ ID NO: 4394 - protein, 5 aa, synthetic construct
DNYAI

SEQ ID NO: 4395 - protein, 5 aa, synthetic construct
TNQNY

SEQ ID NO: 4396 - protein, 5 aa, synthetic construct
YRHGY

SEQ ID NO: 4397 - protein, 5 aa, synthetic construct
RSVHY

SEQ ID NO: 4398 - protein, 5 aa, synthetic construct
FTSAW

SEQ ID NO: 4399 - protein, 5 aa, synthetic construct
GMSRY

SEQ ID NO: 4400 - protein, 5 aa, synthetic construct
GHSDF

SEQ ID NO: 4401 - protein, 5 aa, synthetic construct
VWNHY

SEQ ID NO: 4402 - protein, 5 aa, synthetic construct
VRQSY

SEQ ID NO: 4403 - protein, 5 aa, synthetic construct
ARHED

SEQ ID NO: 4404 - protein, 4 aa, synthetic construct
LGIS

SEQ ID NO: 4405 - protein, 5 aa, synthetic construct
GARLY

SEQ ID NO: 4406 - protein, 5 aa, synthetic construct
CTQYY

SEQ ID NO: 4407 - protein, 5 aa, synthetic construct
AAWAL

SEQ ID NO: 4408 - protein, 5 aa, synthetic construct
VITIY

SEQ ID NO: 4409 - protein, 5 aa, synthetic construct
AVGIY

SEQ ID NO: 4410 - protein, 5 aa, synthetic construct
WKNSS

SEQ ID NO: 4411 - protein, 5 aa, synthetic construct
VGWCR

SEQ ID NO: 4412 - protein, 5 aa, synthetic construct
AASGD

SEQ ID NO: 4413 - protein, 5 aa, synthetic construct
TNVDY

SEQ ID NO: 4414 - protein, 5 aa, synthetic construct
KGRVY

SEQ ID NO: 4415 - protein, 5 aa, synthetic construct
GTLYH

SEQ ID NO: 4416 - protein, 5 aa, synthetic construct
MKGAY

SEQ ID NO: 4417 - protein, 5 aa, synthetic construct
GQKLS

SEQ ID NO: 4418 - protein, 5 aa, synthetic construct
KNQVY

SEQ ID NO: 4419 - protein, 5 aa, synthetic construct
GITGD

SEQ ID NO: 4420 - protein, 5 aa, synthetic construct
EIGEV

SEQ ID NO: 4421 - protein, 5 aa, synthetic construct
MSVVY

SEQ ID NO: 4422 - protein, 5 aa, synthetic construct
GARAF

SEQ ID NO: 4423 - protein, 5 aa, synthetic construct
WNHGR

SEQ ID NO: 4424 - protein, 5 aa, synthetic construct
WTGYY

SEQ ID NO: 4425 - protein, 5 aa, synthetic construct
GRDAY

SEQ ID NO: 4426 - protein, 5 aa, synthetic construct
GNNAD

SEQ ID NO: 4427 - protein, 5 aa, synthetic construct
YVENH

SEQ ID NO: 4428 - protein, 5 aa, synthetic construct
VSGGY

SEQ ID NO: 4429 - protein, 5 aa, synthetic construct
GICDY

SEQ ID NO: 4430 - protein, 5 aa, synthetic construct
GHTMY

SEQ ID NO: 4431 - protein, 5 aa, synthetic construct
AMVQY

SEQ ID NO: 4432 - protein, 5 aa, synthetic construct
RRNSY

SEQ ID NO: 4433 - protein, 5 aa, synthetic construct
VTRSD

SEQ ID NO: 4434 - protein, 5 aa, synthetic construct
NRWTH

SEQ ID NO: 4435 - protein, 5 aa, synthetic construct
GVAMY

SEQ ID NO: 4436 - protein, 5 aa, synthetic construct
CISGG

SEQ ID NO: 4437 - protein, 5 aa, synthetic construct
GLHSA

SEQ ID NO: 4438 - protein, 5 aa, synthetic construct
GSRSL

SEQ ID NO: 4439 - protein, 5 aa, synthetic construct
VPDIY

SEQ ID NO: 4440 - protein, 4 aa, synthetic construct
AHGG

SEQ ID NO: 4441 - protein, 5 aa, synthetic construct
GKDHS

SEQ ID NO: 4442 - protein, 5 aa, synthetic construct
GGDGT

SEQ ID NO: 4443 - protein, 5 aa, synthetic construct
GTGRY

SEQ ID NO: 4444 - protein, 5 aa, synthetic construct
VSCCY

SEQ ID NO: 4445 - protein, 5 aa, synthetic construct
DALSY

SEQ ID NO: 4446 - protein, 5 aa, synthetic construct
ARTGG

SEQ ID NO: 4447 - protein, 5 aa, synthetic construct
DFGAV

SEQ ID NO: 4448 - protein, 5 aa, synthetic construct
VRVGY

SEQ ID NO: 4449 - protein, 5 aa, synthetic construct
RGLEY

SEQ ID NO: 4450 - protein, 5 aa, synthetic construct
MRSKD

SEQ ID NO: 4451 - protein, 5 aa, synthetic construct
VVDRY

SEQ ID NO: 4452 - protein, 5 aa, synthetic construct
GLDGL

SEQ ID NO: 4453 - protein, 5 aa, synthetic construct
VRTGN

SEQ ID NO: 4454 - protein, 5 aa, synthetic construct
GARDG

SEQ ID NO: 4455 - protein, 5 aa, synthetic construct
GSGGY

SEQ ID NO: 4456 - protein, 5 aa, synthetic construct
SGNVY

SEQ ID NO: 4457 - protein, 5 aa, synthetic construct
RRGDA

SEQ ID NO: 4458 - protein, 5 aa, synthetic construct
GDRLY

SEQ ID NO: 4459 - protein, 5 aa, synthetic construct
RGGGY

SEQ ID NO: 4460 - protein, 5 aa, synthetic construct
GRGDS

SEQ ID NO: 4461 - protein, 5 aa, synthetic construct
VIGGD

SEQ ID NO: 4462 - protein, 5 aa, synthetic construct
GVRVY

SEQ ID NO: 4463 - protein, 5 aa, synthetic construct
HTGVI

SEQ ID NO: 4464 - protein, 5 aa, synthetic construct
YATGY

SEQ ID NO: 4465 - protein, 5 aa, synthetic construct
TRGRY

SEQ ID NO: 4466 - protein, 5 aa, synthetic construct
NRGNY

SEQ ID NO: 4467 - protein, 5 aa, synthetic construct
GRGYT

SEQ ID NO: 4468 - protein, 5 aa, synthetic construct
MRVTY

SEQ ID NO: 4469 - protein, 5 aa, synthetic construct
GFKQV

SEQ ID NO: 4470 - protein, 5 aa, synthetic construct
GRSTL

SEQ ID NO: 4471 - protein, 5 aa, synthetic construct
FNGTY

SEQ ID NO: 4472 - protein, 5 aa, synthetic construct
VRDGL

SEQ ID NO: 4473 - protein, 5 aa, synthetic construct
MHGGY

SEQ ID NO: 4474 - protein, 5 aa, synthetic construct
GIHLG

SEQ ID NO: 4475 - protein, 5 aa, synthetic construct
GVGGH

SEQ ID NO: 4476 - protein, 5 aa, synthetic construct
DRMHH

SEQ ID NO: 4477 - protein, 5 aa, synthetic construct
GIVNL

SEQ ID NO: 4478 - protein, 5 aa, synthetic construct
GVHVY

SEQ ID NO: 4479 - protein, 5 aa, synthetic construct
GFGCV

SEQ ID NO: 4480 - protein, 5 aa, synthetic construct
IFNVV

SEQ ID NO: 4481 - protein, 5 aa, synthetic construct
NKRKY

SEQ ID NO: 4482 - protein, 5 aa, synthetic construct
GIDSS

SEQ ID NO: 4483 - protein, 5 aa, synthetic construct
NKESL

SEQ ID NO: 4484 - protein, 5 aa, synthetic construct
WNGVY

SEQ ID NO: 4485 - protein, 5 aa, synthetic construct
GRTIY

SEQ ID NO: 4486 - protein, 5 aa, synthetic construct
GVTSV

SEQ ID NO: 4487 - protein, 5 aa, synthetic construct
MIGTM

SEQ ID NO: 4488 - protein, 5 aa, synthetic construct
SDTLY

SEQ ID NO: 4489 - protein, 5 aa, synthetic construct
QRFLT

SEQ ID NO: 4490 - protein, 5 aa, synthetic construct
IRVGY

SEQ ID NO: 4491 - protein, 5 aa, synthetic construct
RDAMY

SEQ ID NO: 4492 - protein, 5 aa, synthetic construct
GTSVY

SEQ ID NO: 4493 - protein, 5 aa, synthetic construct
GINGL

SEQ ID NO: 4494 - protein, 5 aa, synthetic construct
GSLVY

SEQ ID NO: 4495 - protein, 5 aa, synthetic construct
LNSEG

SEQ ID NO: 4496 - protein, 5 aa, synthetic construct
GRHTF

SEQ ID NO: 4497 - protein, 5 aa, synthetic construct
DIGAH

SEQ ID NO: 4498 - protein, 5 aa, synthetic construct
AIGTY

SEQ ID NO: 4499 - protein, 5 aa, synthetic construct
MSNPY

SEQ ID NO: 4500 - protein, 5 aa, synthetic construct
GGNQH

SEQ ID NO: 4501 - protein, 5 aa, synthetic construct
GLGDY

SEQ ID NO: 4502 - protein, 5 aa, synthetic construct
IHSRY

SEQ ID NO: 4503 - protein, 5 aa, synthetic construct
TQANR

SEQ ID NO: 4504 - protein, 5 aa, synthetic construct
GYDMS

SEQ ID NO: 4505 - protein, 5 aa, synthetic construct
GSNLY

SEQ ID NO: 4506 - protein, 5 aa, synthetic construct
GFNQA

SEQ ID NO: 4507 - protein, 5 aa, synthetic construct
GSQIY

SEQ ID NO: 4508 - protein, 5 aa, synthetic construct
GLRGY

SEQ ID NO: 4509 - protein, 5 aa, synthetic construct
GLAVA

SEQ ID NO: 4510 - protein, 5 aa, synthetic construct
SRDNW

SEQ ID NO: 4511 - protein, 5 aa, synthetic construct
GATGA

SEQ ID NO: 4512 - protein, 5 aa, synthetic construct
MSVAY

SEQ ID NO: 4513 - protein, 5 aa, synthetic construct
SRALY

SEQ ID NO: 4514 - protein, 5 aa, synthetic construct
NRNQS

SEQ ID NO: 4515 - protein, 5 aa, synthetic construct
GWDTY

SEQ ID NO: 4516 - protein, 5 aa, synthetic construct
VRKGG

SEQ ID NO: 4517 - protein, 5 aa, synthetic construct
GSVGY

SEQ ID NO: 4518 - protein, 5 aa, synthetic construct
SKQDY

SEQ ID NO: 4519 - protein, 4 aa, synthetic construct
LAGV

SEQ ID NO: 4520 - protein, 5 aa, synthetic construct
GVVMY

SEQ ID NO: 4521 - protein, 5 aa, synthetic construct
DTNGV

SEQ ID NO: 4522 - protein, 5 aa, synthetic construct
GRGHG

SEQ ID NO: 4523 - protein, 5 aa, synthetic construct
GFNTC

SEQ ID NO: 4524 - protein, 4 aa, synthetic construct
AHTY

SEQ ID NO: 4525 - protein, 5 aa, synthetic construct
GGTYA

SEQ ID NO: 4526 - protein, 5 aa, synthetic construct
CHMAY

SEQ ID NO: 4527 - protein, 5 aa, synthetic construct
IVREE

SEQ ID NO: 4528 - protein, 5 aa, synthetic construct
LLYVY

SEQ ID NO: 4529 - protein, 5 aa, synthetic construct
NRHMY

SEQ ID NO: 4530 - protein, 5 aa, synthetic construct
TVGGG

SEQ ID NO: 4531 - protein, 4 aa, synthetic construct
MTKD

SEQ ID NO: 4532 - protein, 5 aa, synthetic construct
RTMLY

SEQ ID NO: 4533 - protein, 5 aa, synthetic construct
GRILY

SEQ ID NO: 4534 - protein, 5 aa, synthetic construct
GMQGM

SEQ ID NO: 4535 - protein, 5 aa, synthetic construct
SAAQY

SEQ ID NO: 4536 - protein, 5 aa, synthetic construct
MMGVY

SEQ ID NO: 4537 - protein, 5 aa, synthetic construct
VSRGN

SEQ ID NO: 4538 - protein, 5 aa, synthetic construct
GVADV

SEQ ID NO: 4539 - protein, 5 aa, synthetic construct
GTGAR

SEQ ID NO: 4540 - protein, 5 aa, synthetic construct
ARVQY

SEQ ID NO: 4541 - protein, 5 aa, synthetic construct
GLVYA

SEQ ID NO: 4542 - protein, 4 aa, synthetic construct
NTFG

SEQ ID NO: 4543 - protein, 5 aa, synthetic construct
DSHVG

SEQ ID NO: 4544 - protein, 5 aa, synthetic construct
CNVDW

SEQ ID NO: 4545 - protein, 5 aa, synthetic construct
THGRY

SEQ ID NO: 4546 - protein, 5 aa, synthetic construct
GLRTL

SEQ ID NO: 4547 - protein, 5 aa, synthetic construct
KQTVY

SEQ ID NO: 4548 - protein, 5 aa, synthetic construct
GANGS

SEQ ID NO: 4549 - protein, 5 aa, synthetic construct
GVGDY

SEQ ID NO: 4550 - protein, 5 aa, synthetic construct
VKDYN

SEQ ID NO: 4551 - protein, 5 aa, synthetic construct
NMLAY

SEQ ID NO: 4552 - protein, 5 aa, synthetic construct
SRTAW

SEQ ID NO: 4553 - protein, 5 aa, synthetic construct
GDAGY

SEQ ID NO: 4554 - protein, 5 aa, synthetic construct
GFGSV

SEQ ID NO: 4555 - protein, 5 aa, synthetic construct
CIAGV

SEQ ID NO: 4556 - protein, 5 aa, synthetic construct
GRNEQ

SEQ ID NO: 4557 - protein, 5 aa, synthetic construct
TRLLY

SEQ ID NO: 4558 - protein, 5 aa, synthetic construct
ASSAY

SEQ ID NO: 4559 - protein, 5 aa, synthetic construct
RVGCY

SEQ ID NO: 4560 - protein, 5 aa, synthetic construct
GMVTW

SEQ ID NO: 4561 - protein, 5 aa, synthetic construct
GSVRY

SEQ ID NO: 4562 - protein, 5 aa, synthetic construct
YVGEY

SEQ ID NO: 4563 - protein, 5 aa, synthetic construct
GGNTY

SEQ ID NO: 4564 - protein, 5 aa, synthetic construct
GTSMR

SEQ ID NO: 4565 - protein, 5 aa, synthetic construct
VSVRY

SEQ ID NO: 4566 - protein, 5 aa, synthetic construct
KHQGC

SEQ ID NO: 4567 - protein, 5 aa, synthetic construct
VTSRY

SEQ ID NO: 4568 - protein, 5 aa, synthetic construct
VRDAW

SEQ ID NO: 4569 - protein, 5 aa, synthetic construct
GSHEY

SEQ ID NO: 4570 - protein, 5 aa, synthetic construct
VGVRS

SEQ ID NO: 4571 - protein, 5 aa, synthetic construct
VRRVW

SEQ ID NO: 4572 - protein, 5 aa, synthetic construct
DTTSH

SEQ ID NO: 4573 - protein, 5 aa, synthetic construct
LRGIY

SEQ ID NO: 4574 - protein, 5 aa, synthetic construct
VTVMY

SEQ ID NO: 4575 - protein, 5 aa, synthetic construct
MASWY

SEQ ID NO: 4576 - protein, 5 aa, synthetic construct
ISGGY

SEQ ID NO: 4577 - protein, 5 aa, synthetic construct
GYGMY

SEQ ID NO: 4578 - protein, 5 aa, synthetic construct
FGRMA

SEQ ID NO: 4579 - protein, 5 aa, synthetic construct
GVGIY

SEQ ID NO: 4580 - protein, 5 aa, synthetic construct
WCWVR

SEQ ID NO: 4581 - protein, 5 aa, synthetic construct
VRKDL

SEQ ID NO: 4582 - protein, 5 aa, synthetic construct
RSMTY

SEQ ID NO: 4583 - protein, 5 aa, synthetic construct
VRRGE

SEQ ID NO: 4584 - protein, 5 aa, synthetic construct
VRSVY

SEQ ID NO: 4585 - protein, 5 aa, synthetic construct
GRATM

SEQ ID NO: 4586 - protein, 5 aa, synthetic construct
GATGV

SEQ ID NO: 4587 - protein, 5 aa, synthetic construct
VKAGH

SEQ ID NO: 4588 - protein, 5 aa, synthetic construct
GDGLY

SEQ ID NO: 4589 - protein, 5 aa, synthetic construct
GIVDY

SEQ ID NO: 4590 - protein, 5 aa, synthetic construct
VMGDY

SEQ ID NO: 4591 - protein, 5 aa, synthetic construct
MRAAY

SEQ ID NO: 4592 - protein, 5 aa, synthetic construct
GDSRY

SEQ ID NO: 4593 - protein, 5 aa, synthetic construct
GYRWI

SEQ ID NO: 4594 - protein, 5 aa, synthetic construct
GKMPY

SEQ ID NO: 4595 - protein, 5 aa, synthetic construct
GNNGC

SEQ ID NO: 4596 - protein, 5 aa, synthetic construct
SRITY

SEQ ID NO: 4597 - protein, 5 aa, synthetic construct
GTGGV

SEQ ID NO: 4598 - protein, 5 aa, synthetic construct
GNSSN

SEQ ID NO: 4599 - protein, 5 aa, synthetic construct
GARSA

SEQ ID NO: 4600 - protein, 5 aa, synthetic construct
GGARW

SEQ ID NO: 4601 - protein, 5 aa, synthetic construct
GDGAR

SEQ ID NO: 4602 - protein, 5 aa, synthetic construct
GSKTY

SEQ ID NO: 4603 - protein, 5 aa, synthetic construct
GYQTY

SEQ ID NO: 4604 - protein, 5 aa, synthetic construct
VTVGY

SEQ ID NO: 4605 - protein, 5 aa, synthetic construct
EHQQY

SEQ ID NO: 4606 - protein, 5 aa, synthetic construct
GDGSY

SEQ ID NO: 4607 - protein, 5 aa, synthetic construct
GQSQY

SEQ ID NO: 4608 - protein, 5 aa, synthetic construct
EGSRY

SEQ ID NO: 4609 - protein, 5 aa, synthetic construct
GVMTY

SEQ ID NO: 4610 - protein, 5 aa, synthetic construct
SVSDY

SEQ ID NO: 4611 - protein, 5 aa, synthetic construct
VRHHT

SEQ ID NO: 4612 - protein, 5 aa, synthetic construct
GASTV

SEQ ID NO: 4613 - protein, 5 aa, synthetic construct
ALARY

SEQ ID NO: 4614 - protein, 5 aa, synthetic construct
VNLSY

SEQ ID NO: 4615 - protein, 5 aa, synthetic construct
NRAEE

SEQ ID NO: 4616 - protein, 5 aa, synthetic construct
VRVDY

SEQ ID NO: 4617 - protein, 5 aa, synthetic construct
GWREY

SEQ ID NO: 4618 - protein, 5 aa, synthetic construct
GIGWY

SEQ ID NO: 4619 - protein, 5 aa, synthetic construct
GGHGL

SEQ ID NO: 4620 - protein, 5 aa, synthetic construct
AVRVY

SEQ ID NO: 4621 - protein, 5 aa, synthetic construct
SEPGY

SEQ ID NO: 4622 - protein, 5 aa, synthetic construct
GFRAV

SEQ ID NO: 4623 - protein, 5 aa, synthetic construct
GFRAI

SEQ ID NO: 4624 - protein, 5 aa, synthetic construct
AHRSY

SEQ ID NO: 4625 - protein, 5 aa, synthetic construct
GAGRY

SEQ ID NO: 4626 - protein, 5 aa, synthetic construct
VRAHS

SEQ ID NO: 4627 - protein, 5 aa, synthetic construct
GHRVY

SEQ ID NO: 4628 - protein, 5 aa, synthetic construct
CVMDY

SEQ ID NO: 4629 - protein, 5 aa, synthetic construct
GRQSA

SEQ ID NO: 4630 - protein, 5 aa, synthetic construct
GVGKY

SEQ ID NO: 4631 - protein, 5 aa, synthetic construct
KQGLY

SEQ ID NO: 4632 - protein, 5 aa, synthetic construct
VRAAV

SEQ ID NO: 4633 - protein, 5 aa, synthetic construct
CLAHY

SEQ ID NO: 4634 - protein, 5 aa, synthetic construct
NNGYD

SEQ ID NO: 4635 - protein, 5 aa, synthetic construct
VRVGD

SEQ ID NO: 4636 - protein, 5 aa, synthetic construct
GTMVY

SEQ ID NO: 4637 - protein, 5 aa, synthetic construct
DDTNY

SEQ ID NO: 4638 - protein, 5 aa, synthetic construct
GGFEY

SEQ ID NO: 4639 - protein, 5 aa, synthetic construct
MRVWY

SEQ ID NO: 4640 - protein, 5 aa, synthetic construct
ARGRL

SEQ ID NO: 4641 - protein, 5 aa, synthetic construct
GWGDY

SEQ ID NO: 4642 - protein, 5 aa, synthetic construct
VSAQY

SEQ ID NO: 4643 - protein, 5 aa, synthetic construct
ARGVY

SEQ ID NO: 4644 - protein, 5 aa, synthetic construct
CRNNG

SEQ ID NO: 4645 - protein, 5 aa, synthetic construct
GAQMV

SEQ ID NO: 4646 - protein, 5 aa, synthetic construct
AHSMY

SEQ ID NO: 4647 - protein, 5 aa, synthetic construct
RHNCY

SEQ ID NO: 4648 - protein, 5 aa, synthetic construct
GRGTY

SEQ ID NO: 4649 - protein, 5 aa, synthetic construct
CQDIY

SEQ ID NO: 4650 - protein, 5 aa, synthetic construct
GQGVG

SEQ ID NO: 4651 - protein, 5 aa, synthetic construct
GRGNV

SEQ ID NO: 4652 - protein, 5 aa, synthetic construct
NWGHY

SEQ ID NO: 4653 - protein, 5 aa, synthetic construct
ERHGL

SEQ ID NO: 4654 - protein, 5 aa, synthetic construct
GRDTA

SEQ ID NO: 4655 - protein, 5 aa, synthetic construct
KSGTY

SEQ ID NO: 4656 - protein, 5 aa, synthetic construct
AQVDY

SEQ ID NO: 4657 - protein, 5 aa, synthetic construct
VCGEG

SEQ ID NO: 4658 - protein, 5 aa, synthetic construct
DREHH

SEQ ID NO: 4659 - protein, 5 aa, synthetic construct
GLGTY

SEQ ID NO: 4660 - protein, 5 aa, synthetic construct
TQGEY

SEQ ID NO: 4661 - protein, 5 aa, synthetic construct
SNMDF

SEQ ID NO: 4662 - protein, 5 aa, synthetic construct
RANAY

SEQ ID NO: 4663 - protein, 5 aa, synthetic construct
DRGSY

SEQ ID NO: 4664 - protein, 5 aa, synthetic construct
SEPHY

SEQ ID NO: 4665 - protein, 5 aa, synthetic construct
GPGNY

SEQ ID NO: 4666 - protein, 5 aa, synthetic construct
VQGDY

SEQ ID NO: 4667 - protein, 5 aa, synthetic construct
GHSEY

SEQ ID NO: 4668 - protein, 5 aa, synthetic construct
GGNEY

SEQ ID NO: 4669 - protein, 5 aa, synthetic construct
MLGNL

SEQ ID NO: 4670 - protein, 5 aa, synthetic construct
GFREQ

SEQ ID NO: 4671 - protein, 5 aa, synthetic construct
VHWGA

SEQ ID NO: 4672 - protein, 5 aa, synthetic construct
TRTFT

SEQ ID NO: 4673 - protein, 5 aa, synthetic construct
GFHQL

SEQ ID NO: 4674 - protein, 5 aa, synthetic construct
KVFQK

SEQ ID NO: 4675 - protein, 5 aa, synthetic construct
SRDGN

SEQ ID NO: 4676 - protein, 5 aa, synthetic construct
MVGVY

SEQ ID NO: 4677 - protein, 5 aa, synthetic construct
GIGIY

SEQ ID NO: 4678 - protein, 5 aa, synthetic construct
GSARA

SEQ ID NO: 4679 - protein, 5 aa, synthetic construct
CNSDY

SEQ ID NO: 4680 - protein, 5 aa, synthetic construct
GHSRY

SEQ ID NO: 4681 - protein, 5 aa, synthetic construct
GRRGE

SEQ ID NO: 4682 - protein, 5 aa, synthetic construct
ATENY

SEQ ID NO: 4683 - protein, 5 aa, synthetic construct
SREQR

SEQ ID NO: 4684 - protein, 5 aa, synthetic construct
FVRMY

SEQ ID NO: 4685 - protein, 5 aa, synthetic construct
GEDDY

SEQ ID NO: 4686 - protein, 5 aa, synthetic construct
GHTRS

SEQ ID NO: 4687 - protein, 5 aa, synthetic construct
GLSLY

SEQ ID NO: 4688 - protein, 5 aa, synthetic construct
LAVEY

SEQ ID NO: 4689 - protein, 5 aa, synthetic construct
NDRTY

SEQ ID NO: 4690 - protein, 5 aa, synthetic construct
GDRSY

SEQ ID NO: 4691 - protein, 5 aa, synthetic construct
MAREY

SEQ ID NO: 4692 - protein, 5 aa, synthetic construct
VSREG

SEQ ID NO: 4693 - protein, 5 aa, synthetic construct
MRGVE

SEQ ID NO: 4694 - protein, 5 aa, synthetic construct
GFRVK

SEQ ID NO: 4695 - protein, 5 aa, synthetic construct
GSHYF

SEQ ID NO: 4696 - protein, 5 aa, synthetic construct
AKVHM

SEQ ID NO: 4697 - protein, 5 aa, synthetic construct
GHGGY

SEQ ID NO: 4698 - protein, 5 aa, synthetic construct
GDLQY

SEQ ID NO: 4699 - protein, 5 aa, synthetic construct
GSNEY

SEQ ID NO: 4700 - protein, 5 aa, synthetic construct
GACLY

SEQ ID NO: 4701 - protein, 5 aa, synthetic construct
GFRER

SEQ ID NO: 4702 - protein, 5 aa, synthetic construct
YDGGF

SEQ ID NO: 4703 - protein, 5 aa, synthetic construct
DRLHV

SEQ ID NO: 4704 - protein, 5 aa, synthetic construct
GWKSY

SEQ ID NO: 4705 - protein, 5 aa, synthetic construct
GIGFY

SEQ ID NO: 4706 - protein, 5 aa, synthetic construct
IRRDG

SEQ ID NO: 4707 - protein, 5 aa, synthetic construct
DGGLY

SEQ ID NO: 4708 - protein, 5 aa, synthetic construct
GMGRY

SEQ ID NO: 4709 - protein, 5 aa, synthetic construct
VFSDY

SEQ ID NO: 4710 - protein, 5 aa, synthetic construct
GGQDY

SEQ ID NO: 4711 - protein, 5 aa, synthetic construct
GGCGY

SEQ ID NO: 4712 - protein, 5 aa, synthetic construct
GDGDY

SEQ ID NO: 4713 - protein, 5 aa, synthetic construct
GMFVD

SEQ ID NO: 4714 - protein, 5 aa, synthetic construct
GESQY

SEQ ID NO: 4715 - protein, 5 aa, synthetic construct
NDGVY

SEQ ID NO: 4716 - protein, 5 aa, synthetic construct
GSGKY

SEQ ID NO: 4717 - protein, 5 aa, synthetic construct
GNSGY

SEQ ID NO: 4718 - protein, 5 aa, synthetic construct
GNGSY

SEQ ID NO: 4719 - protein, 5 aa, synthetic construct
GSGLR

SEQ ID NO: 4720 - protein, 5 aa, synthetic construct
IKDGA

SEQ ID NO: 4721 - protein, 5 aa, synthetic construct
CMTYG

SEQ ID NO: 4722 - protein, 5 aa, synthetic construct
GVGPY

SEQ ID NO: 4723 - protein, 5 aa, synthetic construct
VLVGV

SEQ ID NO: 4724 - protein, 5 aa, synthetic construct
WIGVY

SEQ ID NO: 4725 - protein, 5 aa, synthetic construct
KGGGY

SEQ ID NO: 4726 - protein, 5 aa, synthetic construct
GDANY

SEQ ID NO: 4727 - protein, 5 aa, synthetic construct
TVWEA

SEQ ID NO: 4728 - protein, 5 aa, synthetic construct
VAFDY

SEQ ID NO: 4729 - protein, 5 aa, synthetic construct
CYNDY

SEQ ID NO: 4730 - protein, 5 aa, synthetic construct
GGDAL

SEQ ID NO: 4731 - protein, 5 aa, synthetic construct
NSGWY

SEQ ID NO: 4732 - protein, 5 aa, synthetic construct
FHLGS

SEQ ID NO: 4733 - protein, 5 aa, synthetic construct
TDSER

SEQ ID NO: 4734 - protein, 5 aa, synthetic construct
GNGAY

SEQ ID NO: 4735 - protein, 5 aa, synthetic construct
GVGEY

SEQ ID NO: 4736 - protein, 5 aa, synthetic construct
TSHGV

SEQ ID NO: 4737 - protein, 5 aa, synthetic construct
GDCSS

SEQ ID NO: 4738 - protein, 5 aa, synthetic construct
GTWGA

SEQ ID NO: 4739 - protein, 5 aa, synthetic construct
GLSAS

SEQ ID NO: 4740 - protein, 5 aa, synthetic construct
GTMDY

SEQ ID NO: 4741 - protein, 5 aa, synthetic construct
MVAVY

SEQ ID NO: 4742 - protein, 5 aa, synthetic construct
CAGDY

SEQ ID NO: 4743 - protein, 5 aa, synthetic construct
RAGHF

SEQ ID NO: 4744 - protein, 5 aa, synthetic construct
WRANY

SEQ ID NO: 4745 - protein, 5 aa, synthetic construct
GNTVL

SEQ ID NO: 4746 - protein, 5 aa, synthetic construct
GVSFY

SEQ ID NO: 4747 - protein, 5 aa, synthetic construct
TRTLY

SEQ ID NO: 4748 - protein, 5 aa, synthetic construct
GRGFN

SEQ ID NO: 4749 - protein, 5 aa, synthetic construct
WAAKM

SEQ ID NO: 4750 - protein, 5 aa, synthetic construct
VNSDY

SEQ ID NO: 4751 - protein, 5 aa, synthetic construct
NNGAY

SEQ ID NO: 4752 - protein, 5 aa, synthetic construct
GFHTY

SEQ ID NO: 4753 - protein, 5 aa, synthetic construct
GQREY

SEQ ID NO: 4754 - protein, 5 aa, synthetic construct
KSDDR

SEQ ID NO: 4755 - protein, 4 aa, synthetic construct
LWMQ

SEQ ID NO: 4756 - protein, 5 aa, synthetic construct
WVQAY

SEQ ID NO: 4757 - protein, 5 aa, synthetic construct
GSAVW

SEQ ID NO: 4758 - protein, 5 aa, synthetic construct
GMGSW

SEQ ID NO: 4759 - protein, 5 aa, synthetic construct
GVGVR

SEQ ID NO: 4760 - protein, 5 aa, synthetic construct
AMMDY

SEQ ID NO: 4761 - protein, 4 aa, synthetic construct
HRNG

SEQ ID NO: 4762 - protein, 5 aa, synthetic construct
WDWDT

SEQ ID NO: 4763 - protein, 5 aa, synthetic construct
NVGTY

SEQ ID NO: 4764 - protein, 5 aa, synthetic construct
GGKLK

SEQ ID NO: 4765 - protein, 5 aa, synthetic construct
QWRRY

SEQ ID NO: 4766 - protein, 5 aa, synthetic construct
GLADL

SEQ ID NO: 4767 - protein, 5 aa, synthetic construct
SRVAY

SEQ ID NO: 4768 - protein, 5 aa, synthetic construct
CAGNY

SEQ ID NO: 4769 - protein, 5 aa, synthetic construct
AFGGS

SEQ ID NO: 4770 - protein, 5 aa, synthetic construct
ARTDY

SEQ ID NO: 4771 - protein, 5 aa, synthetic construct
GTSTF

SEQ ID NO: 4772 - protein, 5 aa, synthetic construct
GDHMY

SEQ ID NO: 4773 - protein, 5 aa, synthetic construct
GRDVN

SEQ ID NO: 4774 - protein, 5 aa, synthetic construct
AVWHG

SEQ ID NO: 4775 - protein, 4 aa, synthetic construct
YNIA

SEQ ID NO: 4776 - protein, 5 aa, synthetic construct
GQGRR

SEQ ID NO: 4777 - protein, 5 aa, synthetic construct
GRGRY

SEQ ID NO: 4778 - protein, 5 aa, synthetic construct
AASNV

SEQ ID NO: 4779 - protein, 5 aa, synthetic construct
HRLAD

SEQ ID NO: 4780 - protein, 5 aa, synthetic construct
GLCTY

SEQ ID NO: 4781 - protein, 5 aa, synthetic construct
GVQLH

SEQ ID NO: 4782 - protein, 5 aa, synthetic construct
GMMAY

SEQ ID NO: 4783 - protein, 5 aa, synthetic construct
SADGG

SEQ ID NO: 4784 - protein, 5 aa, synthetic construct
GRGSL

SEQ ID NO: 4785 - protein, 5 aa, synthetic construct
SNMRA

SEQ ID NO: 4786 - protein, 5 aa, synthetic construct
GRTQY

SEQ ID NO: 4787 - protein, 5 aa, synthetic construct
GGNGK

SEQ ID NO: 4788 - protein, 5 aa, synthetic construct
GKDSK

SEQ ID NO: 4789 - protein, 5 aa, synthetic construct
GTQAY

SEQ ID NO: 4790 - protein, 5 aa, synthetic construct
VTEWY

SEQ ID NO: 4791 - protein, 5 aa, synthetic construct
GYCIY

SEQ ID NO: 4792 - protein, 5 aa, synthetic construct
GYTDY

SEQ ID NO: 4793 - protein, 5 aa, synthetic construct
MYNAL

SEQ ID NO: 4794 - protein, 5 aa, synthetic construct
GNDVY

SEQ ID NO: 4795 - protein, 5 aa, synthetic construct
GTLTY

SEQ ID NO: 4796 - protein, 5 aa, synthetic construct
GSNCG

SEQ ID NO: 4797 - protein, 5 aa, synthetic construct
VAMAY

SEQ ID NO: 4798 - protein, 5 aa, synthetic construct
WQAQY

SEQ ID NO: 4799 - protein, 5 aa, synthetic construct
GVGEV

SEQ ID NO: 4800 - protein, 5 aa, synthetic construct
MEHDV

SEQ ID NO: 4801 - protein, 5 aa, synthetic construct
ARDRG

SEQ ID NO: 4802 - protein, 5 aa, synthetic construct
GALLD

SEQ ID NO: 4803 - protein, 5 aa, synthetic construct
ASGAY

SEQ ID NO: 4804 - protein, 4 aa, synthetic construct
RTAG

SEQ ID NO: 4805 - protein, 5 aa, synthetic construct
GWSEY

SEQ ID NO: 4806 - protein, 5 aa, synthetic construct
IQYHG

SEQ ID NO: 4807 - protein, 5 aa, synthetic construct
WDWRV

SEQ ID NO: 4808 - protein, 5 aa, synthetic construct
GRDAG

SEQ ID NO: 4809 - protein, 5 aa, synthetic construct
NNQMY

SEQ ID NO: 4810 - protein, 5 aa, synthetic construct
VLDGL

SEQ ID NO: 4811 - protein, 5 aa, synthetic construct
TVGVY

SEQ ID NO: 4812 - protein, 5 aa, synthetic construct
GTGCM

SEQ ID NO: 4813 - protein, 5 aa, synthetic construct
ERHEY

SEQ ID NO: 4814 - protein, 5 aa, synthetic construct
TRGAY

SEQ ID NO: 4815 - protein, 5 aa, synthetic construct
GVRDA

SEQ ID NO: 4816 - protein, 5 aa, synthetic construct
GHRGE

SEQ ID NO: 4817 - protein, 5 aa, synthetic construct
GIGRY

SEQ ID NO: 4818 - protein, 5 aa, synthetic construct
HANLY

SEQ ID NO: 4819 - protein, 5 aa, synthetic construct
ARVGV

SEQ ID NO: 4820 - protein, 5 aa, synthetic construct
NGNIY

SEQ ID NO: 4821 - protein, 5 aa, synthetic construct
EYQRH

SEQ ID NO: 4822 - protein, 5 aa, synthetic construct
RGLDV

SEQ ID NO: 4823 - protein, 5 aa, synthetic construct
NDLRY

SEQ ID NO: 4824 - protein, 5 aa, synthetic construct
GHASY

SEQ ID NO: 4825 - protein, 5 aa, synthetic construct
ATTVY

SEQ ID NO: 4826 - protein, 5 aa, synthetic construct
GHKAY

SEQ ID NO: 4827 - protein, 5 aa, synthetic construct
VRQCS

SEQ ID NO: 4828 - protein, 5 aa, synthetic construct
MIGWY

SEQ ID NO: 4829 - protein, 5 aa, synthetic construct
GSSIE

SEQ ID NO: 4830 - protein, 5 aa, synthetic construct
RWSTY

SEQ ID NO: 4831 - protein, 5 aa, synthetic construct
GINKG

SEQ ID NO: 4832 - protein, 5 aa, synthetic construct
YYRGY

SEQ ID NO: 4833 - protein, 5 aa, synthetic construct
GNARY

SEQ ID NO: 4834 - protein, 5 aa, synthetic construct
WREIY

SEQ ID NO: 4835 - protein, 5 aa, synthetic construct
MATDY

SEQ ID NO: 4836 - protein, 5 aa, synthetic construct
WYANV

SEQ ID NO: 4837 - protein, 5 aa, synthetic construct
GHDTY

SEQ ID NO: 4838 - protein, 5 aa, synthetic construct
GRVEY

SEQ ID NO: 4839 - protein, 5 aa, synthetic construct
SNLVY

SEQ ID NO: 4840 - protein, 5 aa, synthetic construct
VKGRT

SEQ ID NO: 4841 - protein, 5 aa, synthetic construct
CHQDY

SEQ ID NO: 4842 - protein, 5 aa, synthetic construct
TRGMY

SEQ ID NO: 4843 - protein, 5 aa, synthetic construct
SASFY

SEQ ID NO: 4844 - protein, 5 aa, synthetic construct
TRAQW

SEQ ID NO: 4845 - protein, 5 aa, synthetic construct
VARGQ

SEQ ID NO: 4846 - protein, 5 aa, synthetic construct
GLPHY

SEQ ID NO: 4847 - protein, 5 aa, synthetic construct
RVGLY

SEQ ID NO: 4848 - protein, 5 aa, synthetic construct
MCSVY

SEQ ID NO: 4849 - protein, 5 aa, synthetic construct
GFQIC

SEQ ID NO: 4850 - protein, 5 aa, synthetic construct
CSIAY

SEQ ID NO: 4851 - protein, 5 aa, synthetic construct
ASRTY

SEQ ID NO: 4852 - protein, 5 aa, synthetic construct
RLGRY

SEQ ID NO: 4853 - protein, 5 aa, synthetic construct
GRCVY

SEQ ID NO: 4854 - protein, 5 aa, synthetic construct
GLCQY

SEQ ID NO: 4855 - protein, 5 aa, synthetic construct
ALQVY

SEQ ID NO: 4856 - protein, 5 aa, synthetic construct
ARDAY

SEQ ID NO: 4857 - protein, 5 aa, synthetic construct
SSLVY

SEQ ID NO: 4858 - protein, 5 aa, synthetic construct
GRGFW

SEQ ID NO: 4859 - protein, 5 aa, synthetic construct
RVGRY

SEQ ID NO: 4860 - protein, 5 aa, synthetic construct
GYAVY

SEQ ID NO: 4861 - protein, 5 aa, synthetic construct
AIKTY

SEQ ID NO: 4862 - protein, 5 aa, synthetic construct
GVSAY

SEQ ID NO: 4863 - protein, 5 aa, synthetic construct
NALAY

SEQ ID NO: 4864 - protein, 5 aa, synthetic construct
GNSRY

SEQ ID NO: 4865 - protein, 5 aa, synthetic construct
GRGDY

SEQ ID NO: 4866 - protein, 5 aa, synthetic construct
GKFIY

SEQ ID NO: 4867 - protein, 5 aa, synthetic construct
MREIR

SEQ ID NO: 4868 - protein, 5 aa, synthetic construct
GTQFY

SEQ ID NO: 4869 - protein, 5 aa, synthetic construct
GFHLR

SEQ ID NO: 4870 - protein, 5 aa, synthetic construct
GESQM

SEQ ID NO: 4871 - protein, 5 aa, synthetic construct
GSANY

SEQ ID NO: 4872 - protein, 5 aa, synthetic construct
TRGNY

SEQ ID NO: 4873 - protein, 5 aa, synthetic construct
GWIIY

SEQ ID NO: 4874 - protein, 5 aa, synthetic construct
KLHMD

SEQ ID NO: 4875 - protein, 5 aa, synthetic construct
ASCSE

SEQ ID NO: 4876 - protein, 5 aa, synthetic construct
GGIDY

SEQ ID NO: 4877 - protein, 5 aa, synthetic construct
VRHGV

SEQ ID NO: 4878 - protein, 5 aa, synthetic construct
ITGVY

SEQ ID NO: 4879 - protein, 5 aa, synthetic construct
MMGYG

SEQ ID NO: 4880 - protein, 5 aa, synthetic construct
MYRTY

SEQ ID NO: 4881 - protein, 5 aa, synthetic construct
KPVQL

SEQ ID NO: 4882 - protein, 5 aa, synthetic construct
GFRLA

SEQ ID NO: 4883 - protein, 5 aa, synthetic construct
GMRIY

SEQ ID NO: 4884 - protein, 5 aa, synthetic construct
GIREY

SEQ ID NO: 4885 - protein, 5 aa, synthetic construct
GRHQG

SEQ ID NO: 4886 - protein, 5 aa, synthetic construct
GFGGF

SEQ ID NO: 4887 - protein, 5 aa, synthetic construct
GMGMY

SEQ ID NO: 4888 - protein, 5 aa, synthetic construct
GRDNC

SEQ ID NO: 4889 - protein, 5 aa, synthetic construct
GKGTY

SEQ ID NO: 4890 - protein, 5 aa, synthetic construct
GGVAY

SEQ ID NO: 4891 - protein, 5 aa, synthetic construct
GFRLS

SEQ ID NO: 4892 - protein, 5 aa, synthetic construct
RRIDY

SEQ ID NO: 4893 - protein, 5 aa, synthetic construct
GSSWL

SEQ ID NO: 4894 - protein, 5 aa, synthetic construct
GRYVS

SEQ ID NO: 4895 - protein, 5 aa, synthetic construct
GVGGM

SEQ ID NO: 4896 - protein, 5 aa, synthetic construct
VQSVY

SEQ ID NO: 4897 - protein, 5 aa, synthetic construct
TACVY

SEQ ID NO: 4898 - protein, 5 aa, synthetic construct
GLGIY

SEQ ID NO: 4899 - protein, 5 aa, synthetic construct
GHNNY

SEQ ID NO: 4900 - protein, 5 aa, synthetic construct
GVGMY

SEQ ID NO: 4901 - protein, 5 aa, synthetic construct
MRQSY

SEQ ID NO: 4902 - protein, 5 aa, synthetic construct
GMGVY

SEQ ID NO: 4903 - protein, 5 aa, synthetic construct
GGLCY

SEQ ID NO: 4904 - protein, 5 aa, synthetic construct
GATAY

SEQ ID NO: 4905 - protein, 5 aa, synthetic construct
GDQIT

SEQ ID NO: 4906 - protein, 5 aa, synthetic construct
VPYSV

SEQ ID NO: 4907 - protein, 5 aa, synthetic construct
RSGTY

SEQ ID NO: 4908 - protein, 5 aa, synthetic construct
GDGVY

SEQ ID NO: 4909 - protein, 5 aa, synthetic construct
STLTY

SEQ ID NO: 4910 - protein, 5 aa, synthetic construct
GRAHY

SEQ ID NO: 4911 - protein, 5 aa, synthetic construct
CRIDY

SEQ ID NO: 4912 - protein, 5 aa, synthetic construct
GVGKR

SEQ ID NO: 4913 - protein, 5 aa, synthetic construct
MRGVY

SEQ ID NO: 4914 - protein, 5 aa, synthetic construct
MDEHY

SEQ ID NO: 4915 - protein, 5 aa, synthetic construct
TRHGV

SEQ ID NO: 4916 - protein, 5 aa, synthetic construct
GFHEA

SEQ ID NO: 4917 - protein, 5 aa, synthetic construct
CKRAY

SEQ ID NO: 4918 - protein, 5 aa, synthetic construct
GFSQY

SEQ ID NO: 4919 - protein, 5 aa, synthetic construct
GSGNY

SEQ ID NO: 4920 - protein, 5 aa, synthetic construct
GECDY

SEQ ID NO: 4921 - protein, 5 aa, synthetic construct
RANNE

SEQ ID NO: 4922 - protein, 5 aa, synthetic construct
GIGTF

SEQ ID NO: 4923 - protein, 5 aa, synthetic construct
IPGSV

SEQ ID NO: 4924 - protein, 5 aa, synthetic construct
SNRTY

SEQ ID NO: 4925 - protein, 5 aa, synthetic construct
RGSMY

SEQ ID NO: 4926 - protein, 5 aa, synthetic construct
TVRDY

SEQ ID NO: 4927 - protein, 5 aa, synthetic construct
GIVIY

SEQ ID NO: 4928 - protein, 5 aa, synthetic construct
GAGNF

SEQ ID NO: 4929 - protein, 5 aa, synthetic construct
VTRDY

SEQ ID NO: 4930 - protein, 5 aa, synthetic construct
GRASY

SEQ ID NO: 4931 - protein, 5 aa, synthetic construct
STFTY

SEQ ID NO: 4932 - protein, 5 aa, synthetic construct
RSGAY

SEQ ID NO: 4933 - protein, 5 aa, synthetic construct
VRDSI

SEQ ID NO: 4934 - protein, 5 aa, synthetic construct
GITTY

SEQ ID NO: 4935 - protein, 5 aa, synthetic construct
GAGEY

SEQ ID NO: 4936 - protein, 5 aa, synthetic construct
GSANI

SEQ ID NO: 4937 - protein, 5 aa, synthetic construct
GFRGV

SEQ ID NO: 4938 - protein, 5 aa, synthetic construct
WGRAD

SEQ ID NO: 4939 - protein, 5 aa, synthetic construct
GTLGY

SEQ ID NO: 4940 - protein, 7 aa, synthetic construct
LRQGYTY

SEQ ID NO: 4941 - protein, 5 aa, synthetic construct
DTVDD

SEQ ID NO: 4942 - protein, 7 aa, synthetic construct
SDGYRPY

SEQ ID NO: 4943 - protein, 5 aa, synthetic construct
GLGLY

SEQ ID NO: 4944 - protein, 5 aa, synthetic construct
GNYEY

SEQ ID NO: 4945 - protein, 4 aa, synthetic construct
VKRY

SEQ ID NO: 4946 - protein, 5 aa, synthetic construct
ARNPY

SEQ ID NO: 4947 - protein, 5 aa, synthetic construct
GGGLY

SEQ ID NO: 4948 - protein, 5 aa, synthetic construct
GIHLY

SEQ ID NO: 4949 - protein, 5 aa, synthetic construct
MFSWY

SEQ ID NO: 4950 - protein, 5 aa, synthetic construct
DRRLY

SEQ ID NO: 4951 - protein, 5 aa, synthetic construct
VDHYV

SEQ ID NO: 4952 - protein, 5 aa, synthetic construct
IQELY

SEQ ID NO: 4953 - protein, 5 aa, synthetic construct
KVGVF

SEQ ID NO: 4954 - protein, 5 aa, synthetic construct
SVARY

SEQ ID NO: 4955 - protein, 5 aa, synthetic construct
GMTVY

SEQ ID NO: 4956 - protein, 5 aa, synthetic construct
GFWEN

SEQ ID NO: 4957 - protein, 5 aa, synthetic construct
GVMEY

SEQ ID NO: 4958 - protein, 4 aa, synthetic construct
GGRT

SEQ ID NO: 4959 - protein, 5 aa, synthetic construct
AHRHV

SEQ ID NO: 4960 - protein, 5 aa, synthetic construct
INSGF

SEQ ID NO: 4961 - protein, 5 aa, synthetic construct
TNHGD

SEQ ID NO: 4962 - protein, 5 aa, synthetic construct
QGEGR

SEQ ID NO: 4963 - protein, 5 aa, synthetic construct
GGKAY

SEQ ID NO: 4964 - protein, 5 aa, synthetic construct
VRLAY

SEQ ID NO: 4965 - protein, 5 aa, synthetic construct
MGRQY

SEQ ID NO: 4966 - protein, 5 aa, synthetic construct
GRGMC

SEQ ID NO: 4967 - protein, 5 aa, synthetic construct
DLNEG

SEQ ID NO: 4968 - protein, 5 aa, synthetic construct
RVHDY

SEQ ID NO: 4969 - protein, 5 aa, synthetic construct
YKGSR

SEQ ID NO: 4970 - protein, 5 aa, synthetic construct
TGTDR

SEQ ID NO: 4971 - protein, 5 aa, synthetic construct
VHGAV

SEQ ID NO: 4972 - protein, 5 aa, synthetic construct
ENRDY

SEQ ID NO: 4973 - protein, 5 aa, synthetic construct
RADIY

SEQ ID NO: 4974 - protein, 5 aa, synthetic construct
GWDDY

SEQ ID NO: 4975 - protein, 5 aa, synthetic construct
GAEWY

SEQ ID NO: 4976 - protein, 5 aa, synthetic construct
GIRVA

SEQ ID NO: 4977 - protein, 5 aa, synthetic construct
VRREA

SEQ ID NO: 4978 - protein, 5 aa, synthetic construct
VINMW

SEQ ID NO: 4979 - protein, 4 aa, synthetic construct
RPSV

SEQ ID NO: 4980 - protein, 5 aa, synthetic construct
VVGNW

SEQ ID NO: 4981 - protein, 5 aa, synthetic construct
VQLLY

SEQ ID NO: 4982 - protein, 5 aa, synthetic construct
GFRTE

SEQ ID NO: 4983 - protein, 5 aa, synthetic construct
WPVTR

SEQ ID NO: 4984 - protein, 5 aa, synthetic construct
ENSNA

SEQ ID NO: 4985 - protein, 5 aa, synthetic construct
GTRAL

SEQ ID NO: 4986 - protein, 5 aa, synthetic construct
GESNV

SEQ ID NO: 4987 - protein, 5 aa, synthetic construct
ISGLY

SEQ ID NO: 4988 - protein, 5 aa, synthetic construct
GLTMG

SEQ ID NO: 4989 - protein, 5 aa, synthetic construct
GINRG

SEQ ID NO: 4990 - protein, 5 aa, synthetic construct
ESAGY

SEQ ID NO: 4991 - protein, 5 aa, synthetic construct
NVTAY

SEQ ID NO: 4992 - protein, 5 aa, synthetic construct
LMHSV

SEQ ID NO: 4993 - protein, 5 aa, synthetic construct
VWYGC

SEQ ID NO: 4994 - protein, 5 aa, synthetic construct
CTRDY

SEQ ID NO: 4995 - protein, 5 aa, synthetic construct
VRAGY

SEQ ID NO: 4996 - protein, 5 aa, synthetic construct
GRDEY

SEQ ID NO: 4997 - protein, 5 aa, synthetic construct
EDWVR

SEQ ID NO: 4998 - protein, 5 aa, synthetic construct
WKHVD

SEQ ID NO: 4999 - protein, 5 aa, synthetic construct
CRVDY

SEQ ID NO: 5000 - protein, 5 aa, synthetic construct
WIRRY

SEQ ID NO: 5001 - protein, 5 aa, synthetic construct
STVLY

SEQ ID NO: 5002 - protein, 5 aa, synthetic construct
GDGWY

SEQ ID NO: 5003 - protein, 5 aa, synthetic construct
VAHLL

SEQ ID NO: 5004 - protein, 5 aa, synthetic construct
VPVGL

SEQ ID NO: 5005 - protein, 5 aa, synthetic construct
GATGG

SEQ ID NO: 5006 - protein, 5 aa, synthetic construct
GIGAY

SEQ ID NO: 5007 - protein, 5 aa, synthetic construct
GNTSY

SEQ ID NO: 5008 - protein, 5 aa, synthetic construct
GIGGC

SEQ ID NO: 5009 - protein, 5 aa, synthetic construct
VIGLV

SEQ ID NO: 5010 - protein, 5 aa, synthetic construct
VRHGA

SEQ ID NO: 5011 - protein, 5 aa, synthetic construct
DGPVH

SEQ ID NO: 5012 - protein, 5 aa, synthetic construct
WRRLY

SEQ ID NO: 5013 - protein, 5 aa, synthetic construct
LANDY

SEQ ID NO: 5014 - protein, 5 aa, synthetic construct
GVTMW

SEQ ID NO: 5015 - protein, 5 aa, synthetic construct
YMLGS

SEQ ID NO: 5016 - protein, 5 aa, synthetic construct
RYRFR

SEQ ID NO: 5017 - protein, 5 aa, synthetic construct
RSCLY

SEQ ID NO: 5018 - protein, 5 aa, synthetic construct
NTGLY

SEQ ID NO: 5019 - protein, 5 aa, synthetic construct
GLVDY

SEQ ID NO: 5020 - protein, 5 aa, synthetic construct
VRRMY

SEQ ID NO: 5021 - protein, 5 aa, synthetic construct
MASEY

SEQ ID NO: 5022 - protein, 5 aa, synthetic construct
ENGHY

SEQ ID NO: 5023 - protein, 5 aa, synthetic construct
GLTDA

SEQ ID NO: 5024 - protein, 5 aa, synthetic construct
WESVY

SEQ ID NO: 5025 - protein, 5 aa, synthetic construct
EKNGY

SEQ ID NO: 5026 - protein, 5 aa, synthetic construct
RRSWD

SEQ ID NO: 5027 - protein, 5 aa, synthetic construct
RDGSY

SEQ ID NO: 5028 - protein, 5 aa, synthetic construct
CGTNY

SEQ ID NO: 5029 - protein, 5 aa, synthetic construct
IFRGS

SEQ ID NO: 5030 - protein, 5 aa, synthetic construct
MGDVY

SEQ ID NO: 5031 - protein, 5 aa, synthetic construct
GSVQY

SEQ ID NO: 5032 - protein, 5 aa, synthetic construct
GKSWG

SEQ ID NO: 5033 - protein, 5 aa, synthetic construct
THQLY

SEQ ID NO: 5034 - protein, 5 aa, synthetic construct
GCVAY

SEQ ID NO: 5035 - protein, 5 aa, synthetic construct
DGDRY

SEQ ID NO: 5036 - protein, 5 aa, synthetic construct
CREGT

SEQ ID NO: 5037 - protein, 5 aa, synthetic construct
LRGHY

SEQ ID NO: 5038 - protein, 5 aa, synthetic construct
ANCDY

SEQ ID NO: 5039 - protein, 5 aa, synthetic construct
GTTKY

SEQ ID NO: 5040 - protein, 5 aa, synthetic construct
GSGFV

SEQ ID NO: 5041 - protein, 5 aa, synthetic construct
GLTSD

SEQ ID NO: 5042 - protein, 5 aa, synthetic construct
GFGER

SEQ ID NO: 5043 - protein, 4 aa, synthetic construct
RGRG

SEQ ID NO: 5044 - protein, 5 aa, synthetic construct
GRSSS

SEQ ID NO: 5045 - protein, 5 aa, synthetic construct
AFSGY

SEQ ID NO: 5046 - protein, 5 aa, synthetic construct
AKGTY

SEQ ID NO: 5047 - protein, 5 aa, synthetic construct
VMSSE

SEQ ID NO: 5048 - protein, 5 aa, synthetic construct
RSCDY

SEQ ID NO: 5049 - protein, 5 aa, synthetic construct
IGDRH

SEQ ID NO: 5050 - protein, 5 aa, synthetic construct
NMLIY

SEQ ID NO: 5051 - protein, 5 aa, synthetic construct
RDKLY

SEQ ID NO: 5052 - protein, 5 aa, synthetic construct
MPYVH

SEQ ID NO: 5053 - protein, 5 aa, synthetic construct
HRKTY

SEQ ID NO: 5054 - protein, 5 aa, synthetic construct
SRDSH

SEQ ID NO: 5055 - protein, 5 aa, synthetic construct
GDCCY

SEQ ID NO: 5056 - protein, 5 aa, synthetic construct
NRSSG

SEQ ID NO: 5057 - protein, 5 aa, synthetic construct
WGILY

SEQ ID NO: 5058 - protein, 5 aa, synthetic construct
GRSIY

SEQ ID NO: 5059 - protein, 5 aa, synthetic construct
RHGGW

SEQ ID NO: 5060 - protein, 5 aa, synthetic construct
RHNME

SEQ ID NO: 5061 - protein, 5 aa, synthetic construct
RERRY

SEQ ID NO: 5062 - protein, 5 aa, synthetic construct
SNWIY

SEQ ID NO: 5063 - protein, 5 aa, synthetic construct
DIGHV

SEQ ID NO: 5064 - protein, 5 aa, synthetic construct
EKLVY

SEQ ID NO: 5065 - protein, 5 aa, synthetic construct
VPRSV

SEQ ID NO: 5066 - protein, 5 aa, synthetic construct
RRYKT

SEQ ID NO: 5067 - protein, 5 aa, synthetic construct
MLSGN

SEQ ID NO: 5068 - protein, 5 aa, synthetic construct
GVRYN

SEQ ID NO: 5069 - protein, 5 aa, synthetic construct
AADWY

SEQ ID NO: 5070 - protein, 5 aa, synthetic construct
VVGQH

SEQ ID NO: 5071 - protein, 5 aa, synthetic construct
WGSCY

SEQ ID NO: 5072 - protein, 5 aa, synthetic construct
AQDDY

SEQ ID NO: 5073 - protein, 5 aa, synthetic construct
GKGDY

SEQ ID NO: 5074 - protein, 4 aa, synthetic construct
SPLT

SEQ ID NO: 5075 - protein, 5 aa, synthetic construct
GRCLI

SEQ ID NO: 5076 - protein, 5 aa, synthetic construct
ATAYY

SEQ ID NO: 5077 - protein, 5 aa, synthetic construct
FYGAY

SEQ ID NO: 5078 - protein, 5 aa, synthetic construct
GFKTV

SEQ ID NO: 5079 - protein, 5 aa, synthetic construct
MARNN

SEQ ID NO: 5080 - protein, 5 aa, synthetic construct
MRHSY

SEQ ID NO: 5081 - protein, 5 aa, synthetic construct
GDGEY

SEQ ID NO: 5082 - protein, 5 aa, synthetic construct
STHGY

SEQ ID NO: 5083 - protein, 5 aa, synthetic construct
FVGRY

SEQ ID NO: 5084 - protein, 5 aa, synthetic construct
MHYAY

SEQ ID NO: 5085 - protein, 5 aa, synthetic construct
GSGSY

SEQ ID NO: 5086 - protein, 5 aa, synthetic construct
KWGTY

SEQ ID NO: 5087 - protein, 5 aa, synthetic construct
EREVA

SEQ ID NO: 5088 - protein, 5 aa, synthetic construct
GFHGN

SEQ ID NO: 5089 - protein, 5 aa, synthetic construct
GYRGE

SEQ ID NO: 5090 - protein, 5 aa, synthetic construct
GQAMN

SEQ ID NO: 5091 - protein, 5 aa, synthetic construct
AWSDY

SEQ ID NO: 5092 - protein, 5 aa, synthetic construct
NGGTY

SEQ ID NO: 5093 - protein, 5 aa, synthetic construct
GMASY

SEQ ID NO: 5094 - protein, 5 aa, synthetic construct
GLRQY

SEQ ID NO: 5095 - protein, 5 aa, synthetic construct
GRGRS

SEQ ID NO: 5096 - protein, 5 aa, synthetic construct
FSAFY

SEQ ID NO: 5097 - protein, 5 aa, synthetic construct
MRDAG

SEQ ID NO: 5098 - protein, 5 aa, synthetic construct
CSGLY

SEQ ID NO: 5099 - protein, 5 aa, synthetic construct
GKDAN

SEQ ID NO: 5100 - protein, 5 aa, synthetic construct
ARARD

SEQ ID NO: 5101 - protein, 5 aa, synthetic construct
GFKQA

SEQ ID NO: 5102 - protein, 5 aa, synthetic construct
GHRSY

SEQ ID NO: 5103 - protein, 5 aa, synthetic construct
GYTNY

SEQ ID NO: 5104 - protein, 5 aa, synthetic construct
CRESL

SEQ ID NO: 5105 - protein, 5 aa, synthetic construct
VHHAY

SEQ ID NO: 5106 - protein, 5 aa, synthetic construct
TRRSE

SEQ ID NO: 5107 - protein, 5 aa, synthetic construct
YWTDG

SEQ ID NO: 5108 - protein, 5 aa, synthetic construct
IHHHL

SEQ ID NO: 5109 - protein, 5 aa, synthetic construct
MSRLY

SEQ ID NO: 5110 - protein, 5 aa, synthetic construct
IVGTY

SEQ ID NO: 5111 - protein, 5 aa, synthetic construct
TMRGV

SEQ ID NO: 5112 - protein, 5 aa, synthetic construct
GIGCF

SEQ ID NO: 5113 - protein, 5 aa, synthetic construct
SVGTY

SEQ ID NO: 5114 - protein, 5 aa, synthetic construct
VREDS

SEQ ID NO: 5115 - protein, 5 aa, synthetic construct
WGGAY

SEQ ID NO: 5116 - protein, 5 aa, synthetic construct
SNRGY

SEQ ID NO: 5117 - protein, 5 aa, synthetic construct
TQGAY

SEQ ID NO: 5118 - protein, 5 aa, synthetic construct
MLGRY

SEQ ID NO: 5119 - protein, 5 aa, synthetic construct
GMHTF

SEQ ID NO: 5120 - protein, 5 aa, synthetic construct
GSNAY

SEQ ID NO: 5121 - protein, 5 aa, synthetic construct
VCLHD

SEQ ID NO: 5122 - protein, 4 aa, synthetic construct
ELAY

SEQ ID NO: 5123 - protein, 5 aa, synthetic construct
GSSVY

SEQ ID NO: 5124 - protein, 5 aa, synthetic construct
RTRTY

SEQ ID NO: 5125 - protein, 5 aa, synthetic construct
LGNHY

SEQ ID NO: 5126 - protein, 5 aa, synthetic construct
MSSRY

SEQ ID NO: 5127 - protein, 5 aa, synthetic construct
VRTHG

SEQ ID NO: 5128 - protein, 5 aa, synthetic construct
DFGCV

SEQ ID NO: 5129 - protein, 5 aa, synthetic construct
GFREG

SEQ ID NO: 5130 - protein, 5 aa, synthetic construct
GRTGY

SEQ ID NO: 5131 - protein, 5 aa, synthetic construct
GMDEG

SEQ ID NO: 5132 - protein, 5 aa, synthetic construct
GDGGY

SEQ ID NO: 5133 - protein, 5 aa, synthetic construct
CVGAF

SEQ ID NO: 5134 - protein, 5 aa, synthetic construct
GRGHY

SEQ ID NO: 5135 - protein, 5 aa, synthetic construct
GRGWA

SEQ ID NO: 5136 - protein, 5 aa, synthetic construct
KGGCY

SEQ ID NO: 5137 - protein, 5 aa, synthetic construct
AIRVY

SEQ ID NO: 5138 - protein, 5 aa, synthetic construct
GVSLE

SEQ ID NO: 5139 - protein, 5 aa, synthetic construct
VRGCV

SEQ ID NO: 5140 - protein, 5 aa, synthetic construct
MSGGY

SEQ ID NO: 5141 - protein, 5 aa, synthetic construct
YRGWY

SEQ ID NO: 5142 - protein, 5 aa, synthetic construct
SLQDY

SEQ ID NO: 5143 - protein, 5 aa, synthetic construct
SSDDS

SEQ ID NO: 5144 - protein, 5 aa, synthetic construct
GINKY

SEQ ID NO: 5145 - protein, 5 aa, synthetic construct
SRQMY

SEQ ID NO: 5146 - protein, 5 aa, synthetic construct
MHRWT

SEQ ID NO: 5147 - protein, 5 aa, synthetic construct
GNYVI

SEQ ID NO: 5148 - protein, 5 aa, synthetic construct
FNTTY

SEQ ID NO: 5149 - protein, 5 aa, synthetic construct
GTVDY

SEQ ID NO: 5150 - protein, 5 aa, synthetic construct
ESDVY

SEQ ID NO: 5151 - protein, 5 aa, synthetic construct
GSRDY

SEQ ID NO: 5152 - protein, 5 aa, synthetic construct
VGAVV

SEQ ID NO: 5153 - protein, 5 aa, synthetic construct
GSSTD

SEQ ID NO: 5154 - protein, 5 aa, synthetic construct
NQGRY

SEQ ID NO: 5155 - protein, 5 aa, synthetic construct
NTALY

SEQ ID NO: 5156 - protein, 5 aa, synthetic construct
GLREY

SEQ ID NO: 5157 - protein, 5 aa, synthetic construct
GVGVL

SEQ ID NO: 5158 - protein, 5 aa, synthetic construct
FVSQY

SEQ ID NO: 5159 - protein, 5 aa, synthetic construct
GAWAG

SEQ ID NO: 5160 - protein, 5 aa, synthetic construct
GIGVY

SEQ ID NO: 5161 - protein, 5 aa, synthetic construct
GMKMY

SEQ ID NO: 5162 - protein, 5 aa, synthetic construct
GGLNY

SEQ ID NO: 5163 - protein, 5 aa, synthetic construct
CRDMY

SEQ ID NO: 5164 - protein, 5 aa, synthetic construct
YRSGS

SEQ ID NO: 5165 - protein, 5 aa, synthetic construct
TRWMT

SEQ ID NO: 5166 - protein, 5 aa, synthetic construct
EKTRI

SEQ ID NO: 5167 - protein, 5 aa, synthetic construct
MIHTY

SEQ ID NO: 5168 - protein, 5 aa, synthetic construct
AHVHY

SEQ ID NO: 5169 - protein, 5 aa, synthetic construct
MRWGA

SEQ ID NO: 5170 - protein, 5 aa, synthetic construct
RRGMY

SEQ ID NO: 5171 - protein, 5 aa, synthetic construct
GRGFY

SEQ ID NO: 5172 - protein, 5 aa, synthetic construct
RAMGH

SEQ ID NO: 5173 - protein, 5 aa, synthetic construct
DIMLY

SEQ ID NO: 5174 - protein, 5 aa, synthetic construct
GLCAY

SEQ ID NO: 5175 - protein, 5 aa, synthetic construct
WDWIH

SEQ ID NO: 5176 - protein, 5 aa, synthetic construct
IAGSI

SEQ ID NO: 5177 - protein, 5 aa, synthetic construct
ASGCV

SEQ ID NO: 5178 - protein, 5 aa, synthetic construct
MNNVY

SEQ ID NO: 5179 - protein, 5 aa, synthetic construct
IRDWQ

SEQ ID NO: 5180 - protein, 5 aa, synthetic construct
GTGCY

SEQ ID NO: 5181 - protein, 5 aa, synthetic construct
GLGMY

SEQ ID NO: 5182 - protein, 5 aa, synthetic construct
KAIMY

SEQ ID NO: 5183 - protein, 5 aa, synthetic construct
MGLAY

SEQ ID NO: 5184 - protein, 5 aa, synthetic construct
VNYMV

SEQ ID NO: 5185 - protein, 5 aa, synthetic construct
GNVRY

SEQ ID NO: 5186 - protein, 5 aa, synthetic construct
SFSDY

SEQ ID NO: 5187 - protein, 5 aa, synthetic construct
KRWSK

SEQ ID NO: 5188 - protein, 5 aa, synthetic construct
DARGD

SEQ ID NO: 5189 - protein, 5 aa, synthetic construct
GMRNE

SEQ ID NO: 5190 - protein, 5 aa, synthetic construct
TTVDY

SEQ ID NO: 5191 - protein, 5 aa, synthetic construct
DGVNR

SEQ ID NO: 5192 - protein, 5 aa, synthetic construct
GTRHY

SEQ ID NO: 5193 - protein, 5 aa, synthetic construct
KSGPY

SEQ ID NO: 5194 - protein, 5 aa, synthetic construct
GVSDY

SEQ ID NO: 5195 - protein, 5 aa, synthetic construct
GAGQR

SEQ ID NO: 5196 - protein, 5 aa, synthetic construct
MSGVY

SEQ ID NO: 5197 - protein, 5 aa, synthetic construct
GISGG

SEQ ID NO: 5198 - protein, 5 aa, synthetic construct
TGWDV

SEQ ID NO: 5199 - protein, 5 aa, synthetic construct
LNHQY

SEQ ID NO: 5200 - protein, 5 aa, synthetic construct
VKNCS

SEQ ID NO: 5201 - protein, 5 aa, synthetic construct
GTSDY

SEQ ID NO: 5202 - protein, 5 aa, synthetic construct
AIGYY

SEQ ID NO: 5203 - protein, 5 aa, synthetic construct
SNATG

SEQ ID NO: 5204 - protein, 5 aa, synthetic construct
GRSTS

SEQ ID NO: 5205 - protein, 5 aa, synthetic construct
CRYGG

SEQ ID NO: 5206 - protein, 5 aa, synthetic construct
GAGEA

SEQ ID NO: 5207 - protein, 5 aa, synthetic construct
AHHVY

SEQ ID NO: 5208 - protein, 5 aa, synthetic construct
ARARG

SEQ ID NO: 5209 - protein, 5 aa, synthetic construct
IRDDY

SEQ ID NO: 5210 - protein, 5 aa, synthetic construct
GTKLY

SEQ ID NO: 5211 - protein, 5 aa, synthetic construct
DFRGR

SEQ ID NO: 5212 - protein, 5 aa, synthetic construct
GRGGR

SEQ ID NO: 5213 - protein, 5 aa, synthetic construct
GAREY

SEQ ID NO: 5214 - protein, 5 aa, synthetic construct
GRSGL

SEQ ID NO: 5215 - protein, 5 aa, synthetic construct
TARQT

SEQ ID NO: 5216 - protein, 5 aa, synthetic construct
GSNSL

SEQ ID NO: 5217 - protein, 5 aa, synthetic construct
GRTRL

SEQ ID NO: 5218 - protein, 5 aa, synthetic construct
GAHGA

SEQ ID NO: 5219 - protein, 5 aa, synthetic construct
RNRGY

SEQ ID NO: 5220 - protein, 5 aa, synthetic construct
RADDN

SEQ ID NO: 5221 - protein, 5 aa, synthetic construct
GATTY

SEQ ID NO: 5222 - protein, 5 aa, synthetic construct
VRTCA

SEQ ID NO: 5223 - protein, 5 aa, synthetic construct
VAGGY

SEQ ID NO: 5224 - protein, 5 aa, synthetic construct
MRTDY

SEQ ID NO: 5225 - protein, 5 aa, synthetic construct
GNQGE

SEQ ID NO: 5226 - protein, 5 aa, synthetic construct
GKGMQ

SEQ ID NO: 5227 - protein, 5 aa, synthetic construct
IFGAR

SEQ ID NO: 5228 - protein, 5 aa, synthetic construct
TRSMY

SEQ ID NO: 5229 - protein, 5 aa, synthetic construct
GLHIY

SEQ ID NO: 5230 - protein, 5 aa, synthetic construct
ARRTY

SEQ ID NO: 5231 - protein, 5 aa, synthetic construct
IRVDY

SEQ ID NO: 5232 - protein, 5 aa, synthetic construct
GSIEY

SEQ ID NO: 5233 - protein, 5 aa, synthetic construct
GRLTQ

SEQ ID NO: 5234 - protein, 5 aa, synthetic construct
GNRSY

SEQ ID NO: 5235 - protein, 5 aa, synthetic construct
YTGAY

SEQ ID NO: 5236 - protein, 5 aa, synthetic construct
IYQMY

SEQ ID NO: 5237 - protein, 5 aa, synthetic construct
WAGSY

SEQ ID NO: 5238 - protein, 5 aa, synthetic construct
GGDVY

SEQ ID NO: 5239 - protein, 5 aa, synthetic construct
VQNET

SEQ ID NO: 5240 - protein, 5 aa, synthetic construct
CLHHG

SEQ ID NO: 5241 - protein, 5 aa, synthetic construct
GWAPR

SEQ ID NO: 5242 - protein, 5 aa, synthetic construct
GIRWE

SEQ ID NO: 5243 - protein, 5 aa, synthetic construct
GVRLY

SEQ ID NO: 5244 - protein, 5 aa, synthetic construct
KQGIY

SEQ ID NO: 5245 - protein, 5 aa, synthetic construct
WQRIY

SEQ ID NO: 5246 - protein, 5 aa, synthetic construct
TGGGY

SEQ ID NO: 5247 - protein, 5 aa, synthetic construct
TQGNY

SEQ ID NO: 5248 - protein, 5 aa, synthetic construct
GGVVY

SEQ ID NO: 5249 - protein, 5 aa, synthetic construct
GFGTY

SEQ ID NO: 5250 - protein, 5 aa, synthetic construct
KKADY

SEQ ID NO: 5251 - protein, 5 aa, synthetic construct
TGGDY

SEQ ID NO: 5252 - protein, 5 aa, synthetic construct
WREYV

SEQ ID NO: 5253 - protein, 5 aa, synthetic construct
GAGSY

SEQ ID NO: 5254 - protein, 5 aa, synthetic construct
DRSMY

SEQ ID NO: 5255 - protein, 5 aa, synthetic construct
WGWSD

SEQ ID NO: 5256 - protein, 5 aa, synthetic construct
GSGQR

SEQ ID NO: 5257 - protein, 5 aa, synthetic construct
SWATY

SEQ ID NO: 5258 - protein, 5 aa, synthetic construct
GNMAY

SEQ ID NO: 5259 - protein, 5 aa, synthetic construct
VRSGV

SEQ ID NO: 5260 - protein, 5 aa, synthetic construct
ATRVL

SEQ ID NO: 5261 - protein, 5 aa, synthetic construct
VPRGH

SEQ ID NO: 5262 - protein, 5 aa, synthetic construct
CLWAS

SEQ ID NO: 5263 - protein, 5 aa, synthetic construct
GLLEY

SEQ ID NO: 5264 - protein, 5 aa, synthetic construct
GAHAY

SEQ ID NO: 5265 - protein, 5 aa, synthetic construct
WNQVY

SEQ ID NO: 5266 - protein, 4 aa, synthetic construct
GVTL

SEQ ID NO: 5267 - protein, 5 aa, synthetic construct
YVGGY

SEQ ID NO: 5268 - protein, 5 aa, synthetic construct
MNGNY

SEQ ID NO: 5269 - protein, 5 aa, synthetic construct
NGGEH

SEQ ID NO: 5270 - protein, 5 aa, synthetic construct
CVHVY

SEQ ID NO: 5271 - protein, 5 aa, synthetic construct
MMHAH

SEQ ID NO: 5272 - protein, 5 aa, synthetic construct
GTGSV

SEQ ID NO: 5273 - protein, 5 aa, synthetic construct
SPGAA

SEQ ID NO: 5274 - protein, 5 aa, synthetic construct
GASHY

SEQ ID NO: 5275 - protein, 5 aa, synthetic construct
ARVEY

SEQ ID NO: 5276 - protein, 5 aa, synthetic construct
SVAVY

SEQ ID NO: 5277 - protein, 5 aa, synthetic construct
GGTTY

SEQ ID NO: 5278 - protein, 5 aa, synthetic construct
TRDGY

SEQ ID NO: 5279 - protein, 5 aa, synthetic construct
GSVIY

SEQ ID NO: 5280 - protein, 5 aa, synthetic construct
GFGAH

SEQ ID NO: 5281 - protein, 5 aa, synthetic construct
IRRSY

SEQ ID NO: 5282 - protein, 5 aa, synthetic construct
RNVFY

SEQ ID NO: 5283 - protein, 5 aa, synthetic construct
VLDGC

SEQ ID NO: 5284 - protein, 5 aa, synthetic construct
GRDRM

SEQ ID NO: 5285 - protein, 5 aa, synthetic construct
VAMGL

SEQ ID NO: 5286 - protein, 5 aa, synthetic construct
MKGGR

SEQ ID NO: 5287 - protein, 5 aa, synthetic construct
DGLVI

SEQ ID NO: 5288 - protein, 5 aa, synthetic construct
IARVY

SEQ ID NO: 5289 - protein, 5 aa, synthetic construct
GQGTY

SEQ ID NO: 5290 - protein, 5 aa, synthetic construct
GRTMY

SEQ ID NO: 5291 - protein, 5 aa, synthetic construct
GANRL

SEQ ID NO: 5292 - protein, 5 aa, synthetic construct
VKRHW

SEQ ID NO: 5293 - protein, 5 aa, synthetic construct
QNGHY

SEQ ID NO: 5294 - protein, 5 aa, synthetic construct
TGVGV

SEQ ID NO: 5295 - protein, 5 aa, synthetic construct
GRVHY

SEQ ID NO: 5296 - protein, 5 aa, synthetic construct
IAGLD

SEQ ID NO: 5297 - protein, 5 aa, synthetic construct
KAVAY

SEQ ID NO: 5298 - protein, 5 aa, synthetic construct
RRGGL

SEQ ID NO: 5299 - protein, 5 aa, synthetic construct
KARIG

SEQ ID NO: 5300 - protein, 5 aa, synthetic construct
GNRAY

SEQ ID NO: 5301 - protein, 5 aa, synthetic construct
CPIGE

SEQ ID NO: 5302 - protein, 5 aa, synthetic construct
GGGSY

SEQ ID NO: 5303 - protein, 5 aa, synthetic construct
VWNRY

SEQ ID NO: 5304 - protein, 5 aa, synthetic construct
GAGAY

SEQ ID NO: 5305 - protein, 5 aa, synthetic construct
GTDVR

SEQ ID NO: 5306 - protein, 5 aa, synthetic construct
GTDAY

SEQ ID NO: 5307 - protein, 5 aa, synthetic construct
GSAEY

SEQ ID NO: 5308 - protein, 5 aa, synthetic construct
GTGWY

SEQ ID NO: 5309 - protein, 4 aa, synthetic construct
NMTY

SEQ ID NO: 5310 - protein, 5 aa, synthetic construct
VRRHL

SEQ ID NO: 5311 - protein, 5 aa, synthetic construct
GQTHT

SEQ ID NO: 5312 - protein, 4 aa, synthetic construct
CYDW

SEQ ID NO: 5313 - protein, 5 aa, synthetic construct
FTREY

SEQ ID NO: 5314 - protein, 5 aa, synthetic construct
GYCPY

SEQ ID NO: 5315 - protein, 5 aa, synthetic construct
GRHEA

SEQ ID NO: 5316 - protein, 5 aa, synthetic construct
GVGNI

SEQ ID NO: 5317 - protein, 5 aa, synthetic construct
VQRTV

SEQ ID NO: 5318 - protein, 5 aa, synthetic construct
FGSIY

SEQ ID NO: 5319 - protein, 5 aa, synthetic construct
SVGEY

SEQ ID NO: 5320 - protein, 5 aa, synthetic construct
ARNAY

SEQ ID NO: 5321 - protein, 5 aa, synthetic construct
DFGLK

SEQ ID NO: 5322 - protein, 5 aa, synthetic construct
RREWY

SEQ ID NO: 5323 - protein, 5 aa, synthetic construct
GELGI

SEQ ID NO: 5324 - protein, 5 aa, synthetic construct
AMASY

SEQ ID NO: 5325 - protein, 5 aa, synthetic construct
VYWGT

SEQ ID NO: 5326 - protein, 5 aa, synthetic construct
GAGVY

SEQ ID NO: 5327 - protein, 5 aa, synthetic construct
GTRLY

SEQ ID NO: 5328 - protein, 5 aa, synthetic construct
GQSKA

SEQ ID NO: 5329 - protein, 5 aa, synthetic construct
NDGRY

SEQ ID NO: 5330 - protein, 5 aa, synthetic construct
GLYAY

SEQ ID NO: 5331 - protein, 5 aa, synthetic construct
GRGAN

SEQ ID NO: 5332 - protein, 5 aa, synthetic construct
VRALM

SEQ ID NO: 5333 - protein, 5 aa, synthetic construct
VHRTY

SEQ ID NO: 5334 - protein, 5 aa, synthetic construct
MAARA

SEQ ID NO: 5335 - protein, 5 aa, synthetic construct
RSAVY

SEQ ID NO: 5336 - protein, 5 aa, synthetic construct
YGGLY

SEQ ID NO: 5337 - protein, 5 aa, synthetic construct
NLRLT

SEQ ID NO: 5338 - protein, 5 aa, synthetic construct
VNMGY

SEQ ID NO: 5339 - protein, 5 aa, synthetic construct
GTKNV

SEQ ID NO: 5340 - protein, 5 aa, synthetic construct
ARNDY

SEQ ID NO: 5341 - protein, 5 aa, synthetic construct
ISSGE

SEQ ID NO: 5342 - protein, 5 aa, synthetic construct
RRWDN

SEQ ID NO: 5343 - protein, 5 aa, synthetic construct
AVHVY

SEQ ID NO: 5344 - protein, 5 aa, synthetic construct
ERLNY

SEQ ID NO: 5345 - protein, 5 aa, synthetic construct
ATRIY

SEQ ID NO: 5346 - protein, 5 aa, synthetic construct
FRGAY

SEQ ID NO: 5347 - protein, 5 aa, synthetic construct
VWKNY

SEQ ID NO: 5348 - protein, 5 aa, synthetic construct
GWTIY

SEQ ID NO: 5349 - protein, 5 aa, synthetic construct
THNTY

SEQ ID NO: 5350 - protein, 5 aa, synthetic construct
GVEVY

SEQ ID NO: 5351 - protein, 5 aa, synthetic construct
RGEVY

SEQ ID NO: 5352 - protein, 5 aa, synthetic construct
GGKGC

SEQ ID NO: 5353 - protein, 5 aa, synthetic construct
GWSDY

SEQ ID NO: 5354 - protein, 5 aa, synthetic construct
GLSAG

SEQ ID NO: 5355 - protein, 5 aa, synthetic construct
VSTCY

SEQ ID NO: 5356 - protein, 5 aa, synthetic construct
RGVLY

SEQ ID NO: 5357 - protein, 5 aa, synthetic construct
GRALY

SEQ ID NO: 5358 - protein, 5 aa, synthetic construct
VTHNG

SEQ ID NO: 5359 - protein, 5 aa, synthetic construct
TFQGH

SEQ ID NO: 5360 - protein, 5 aa, synthetic construct
RGLGY

SEQ ID NO: 5361 - protein, 5 aa, synthetic construct
GMKAS

SEQ ID NO: 5362 - protein, 4 aa, synthetic construct
GAIG

SEQ ID NO: 5363 - protein, 5 aa, synthetic construct
GAGNY

SEQ ID NO: 5364 - protein, 5 aa, synthetic construct
VRDLY

SEQ ID NO: 5365 - protein, 5 aa, synthetic construct
MLEYY

SEQ ID NO: 5366 - protein, 5 aa, synthetic construct
VRGGY

SEQ ID NO: 5367 - protein, 5 aa, synthetic construct
ERHSY

SEQ ID NO: 5368 - protein, 5 aa, synthetic construct
MIHRW

SEQ ID NO: 5369 - protein, 5 aa, synthetic construct
EVHVS

SEQ ID NO: 5370 - protein, 5 aa, synthetic construct
MQGVM

SEQ ID NO: 5371 - protein, 5 aa, synthetic construct
GASEL

SEQ ID NO: 5372 - protein, 5 aa, synthetic construct
ADCSY

SEQ ID NO: 5373 - protein, 5 aa, synthetic construct
GIGSF

SEQ ID NO: 5374 - protein, 5 aa, synthetic construct
SKGGY

SEQ ID NO: 5375 - protein, 5 aa, synthetic construct
GLRTY

SEQ ID NO: 5376 - protein, 5 aa, synthetic construct
MTSEY

SEQ ID NO: 5377 - protein, 5 aa, synthetic construct
CGNQA

SEQ ID NO: 5378 - protein, 5 aa, synthetic construct
EMAML

SEQ ID NO: 5379 - protein, 5 aa, synthetic construct
GLDQY

SEQ ID NO: 5380 - protein, 5 aa, synthetic construct
TVAVY

SEQ ID NO: 5381 - protein, 5 aa, synthetic construct
EWSRY

SEQ ID NO: 5382 - protein, 5 aa, synthetic construct
MILRY

SEQ ID NO: 5383 - protein, 5 aa, synthetic construct
GRTWA

SEQ ID NO: 5384 - protein, 5 aa, synthetic construct
VRYDV

SEQ ID NO: 5385 - protein, 5 aa, synthetic construct
MRYVY

SEQ ID NO: 5386 - protein, 5 aa, synthetic construct
SHGLL

SEQ ID NO: 5387 - protein, 5 aa, synthetic construct
QVGTY

SEQ ID NO: 5388 - protein, 5 aa, synthetic construct
AKSGL

SEQ ID NO: 5389 - protein, 5 aa, synthetic construct
GRNAG

SEQ ID NO: 5390 - protein, 5 aa, synthetic construct
MGNVY

SEQ ID NO: 5391 - protein, 5 aa, synthetic construct
VHGMY

SEQ ID NO: 5392 - protein, 5 aa, synthetic construct
GKGGY

SEQ ID NO: 5393 - protein, 5 aa, synthetic construct
GLSKD

SEQ ID NO: 5394 - protein, 5 aa, synthetic construct
VRESV

SEQ ID NO: 5395 - protein, 5 aa, synthetic construct
GVKWY

SEQ ID NO: 5396 - protein, 5 aa, synthetic construct
CRGNG

SEQ ID NO: 5397 - protein, 5 aa, synthetic construct
QRMAV

SEQ ID NO: 5398 - protein, 5 aa, synthetic construct
GARHY

SEQ ID NO: 5399 - protein, 5 aa, synthetic construct
GIGSY

SEQ ID NO: 5400 - protein, 5 aa, synthetic construct
ESKVY

SEQ ID NO: 5401 - protein, 5 aa, synthetic construct
MRDDF

SEQ ID NO: 5402 - protein, 5 aa, synthetic construct
VTGTY

SEQ ID NO: 5403 - protein, 5 aa, synthetic construct
MVGAI

SEQ ID NO: 5404 - protein, 5 aa, synthetic construct
LRGTY

SEQ ID NO: 5405 - protein, 5 aa, synthetic construct
DWQEY

SEQ ID NO: 5406 - protein, 5 aa, synthetic construct
GNMRY

SEQ ID NO: 5407 - protein, 5 aa, synthetic construct
RGGRY

SEQ ID NO: 5408 - protein, 5 aa, synthetic construct
GVSVY

SEQ ID NO: 5409 - protein, 5 aa, synthetic construct
VLGRE

SEQ ID NO: 5410 - protein, 5 aa, synthetic construct
GNKRG

SEQ ID NO: 5411 - protein, 5 aa, synthetic construct
VRDGI

SEQ ID NO: 5412 - protein, 5 aa, synthetic construct
MQRQY

SEQ ID NO: 5413 - protein, 5 aa, synthetic construct
FTCVY

SEQ ID NO: 5414 - protein, 5 aa, synthetic construct
FSSAY

SEQ ID NO: 5415 - protein, 5 aa, synthetic construct
AQTGY

SEQ ID NO: 5416 - protein, 5 aa, synthetic construct
MRADY

SEQ ID NO: 5417 - protein, 5 aa, synthetic construct
GEHSY

SEQ ID NO: 5418 - protein, 5 aa, synthetic construct
GRNLY

SEQ ID NO: 5419 - protein, 5 aa, synthetic construct
MQNEY

SEQ ID NO: 5420 - protein, 5 aa, synthetic construct
GLATY

SEQ ID NO: 5421 - protein, 5 aa, synthetic construct
GVVKY

SEQ ID NO: 5422 - protein, 5 aa, synthetic construct
GRTVY

SEQ ID NO: 5423 - protein, 5 aa, synthetic construct
MHRIT

SEQ ID NO: 5424 - protein, 5 aa, synthetic construct
MRYRM

SEQ ID NO: 5425 - protein, 5 aa, synthetic construct
GWGVM

SEQ ID NO: 5426 - protein, 5 aa, synthetic construct
GHNDY

SEQ ID NO: 5427 - protein, 4 aa, synthetic construct
LDAW

SEQ ID NO: 5428 - protein, 5 aa, synthetic construct
VRNVY

SEQ ID NO: 5429 - protein, 5 aa, synthetic construct
VEAEY

SEQ ID NO: 5430 - protein, 5 aa, synthetic construct
GLGVG

SEQ ID NO: 5431 - protein, 5 aa, synthetic construct
VHCGY

SEQ ID NO: 5432 - protein, 5 aa, synthetic construct
RQILY

SEQ ID NO: 5433 - protein, 5 aa, synthetic construct
GRGNY

SEQ ID NO: 5434 - protein, 5 aa, synthetic construct
GHAIY

SEQ ID NO: 5435 - protein, 4 aa, synthetic construct
NGDN

SEQ ID NO: 5436 - protein, 5 aa, synthetic construct
GWGSY

SEQ ID NO: 5437 - protein, 5 aa, synthetic construct
CNWTY

SEQ ID NO: 5438 - protein, 5 aa, synthetic construct
LGLDY

SEQ ID NO: 5439 - protein, 5 aa, synthetic construct
GMIDF

SEQ ID NO: 5440 - protein, 5 aa, synthetic construct
NGMTY

SEQ ID NO: 5441 - protein, 5 aa, synthetic construct
WGGSY

SEQ ID NO: 5442 - protein, 5 aa, synthetic construct
WRAEY

SEQ ID NO: 5443 - protein, 5 aa, synthetic construct
NGIDT

SEQ ID NO: 5444 - protein, 5 aa, synthetic construct
GARTY

SEQ ID NO: 5445 - protein, 5 aa, synthetic construct
TLVAD

SEQ ID NO: 5446 - protein, 5 aa, synthetic construct
GGGIG

SEQ ID NO: 5447 - protein, 5 aa, synthetic construct
GMHDY

SEQ ID NO: 5448 - protein, 4 aa, synthetic construct
GLAR

SEQ ID NO: 5449 - protein, 4 aa, synthetic construct
GGRG

SEQ ID NO: 5450 - protein, 5 aa, synthetic construct
SVRGY

SEQ ID NO: 5451 - protein, 5 aa, synthetic construct
VRWAY

SEQ ID NO: 5452 - protein, 5 aa, synthetic construct
ARGDY

SEQ ID NO: 5453 - protein, 5 aa, synthetic construct
GFLGL

SEQ ID NO: 5454 - protein, 5 aa, synthetic construct
GLGEY

SEQ ID NO: 5455 - protein, 5 aa, synthetic construct
GRDVH

SEQ ID NO: 5456 - protein, 5 aa, synthetic construct
GRGKY

SEQ ID NO: 5457 - protein, 5 aa, synthetic construct
VREVY

SEQ ID NO: 5458 - protein, 5 aa, synthetic construct
RRSNY

SEQ ID NO: 5459 - protein, 5 aa, synthetic construct
SHQAY

SEQ ID NO: 5460 - protein, 5 aa, synthetic construct
GTHAY

SEQ ID NO: 5461 - protein, 5 aa, synthetic construct
GRETY

SEQ ID NO: 5462 - protein, 5 aa, synthetic construct
GYQSS

SEQ ID NO: 5463 - protein, 5 aa, synthetic construct
GTKKY

SEQ ID NO: 5464 - protein, 5 aa, synthetic construct
VSQGF

SEQ ID NO: 5465 - protein, 5 aa, synthetic construct
MIVNF

SEQ ID NO: 5466 - protein, 5 aa, synthetic construct
GHSYF

SEQ ID NO: 5467 - protein, 5 aa, synthetic construct
GYNSY

SEQ ID NO: 5468 - protein, 5 aa, synthetic construct
GKHVN

SEQ ID NO: 5469 - protein, 5 aa, synthetic construct
IIVPG

SEQ ID NO: 5470 - protein, 5 aa, synthetic construct
TSMDY

SEQ ID NO: 5471 - protein, 5 aa, synthetic construct
VVHGG

SEQ ID NO: 5472 - protein, 5 aa, synthetic construct
GVTEY

SEQ ID NO: 5473 - protein, 5 aa, synthetic construct
KVMGY

SEQ ID NO: 5474 - protein, 5 aa, synthetic construct
GFREK

SEQ ID NO: 5475 - protein, 5 aa, synthetic construct
GDMAY

SEQ ID NO: 5476 - protein, 5 aa, synthetic construct
VWARC

SEQ ID NO: 5477 - protein, 5 aa, synthetic construct
RMRQY

SEQ ID NO: 5478 - protein, 5 aa, synthetic construct
IVGSR

SEQ ID NO: 5479 - protein, 5 aa, synthetic construct
RPHVY

SEQ ID NO: 5480 - protein, 5 aa, synthetic construct
ARHGV

SEQ ID NO: 5481 - protein, 5 aa, synthetic construct
GRSRY

SEQ ID NO: 5482 - protein, 5 aa, synthetic construct
HMQIY

SEQ ID NO: 5483 - protein, 5 aa, synthetic construct
GSWGT

SEQ ID NO: 5484 - protein, 5 aa, synthetic construct
GIVLS

SEQ ID NO: 5485 - protein, 5 aa, synthetic construct
FATQY

SEQ ID NO: 5486 - protein, 5 aa, synthetic construct
WNGPY

SEQ ID NO: 5487 - protein, 5 aa, synthetic construct
GFNAN

SEQ ID NO: 5488 - protein, 5 aa, synthetic construct
GQSRY

SEQ ID NO: 5489 - protein, 5 aa, synthetic construct
VCSDY

SEQ ID NO: 5490 - protein, 5 aa, synthetic construct
ARCGY

SEQ ID NO: 5491 - protein, 5 aa, synthetic construct
GTGHY

SEQ ID NO: 5492 - protein, 5 aa, synthetic construct
SSCTY

SEQ ID NO: 5493 - protein, 5 aa, synthetic construct
VQRVG

SEQ ID NO: 5494 - protein, 5 aa, synthetic construct
VLHHM

SEQ ID NO: 5495 - protein, 5 aa, synthetic construct
GRTVW

SEQ ID NO: 5496 - protein, 5 aa, synthetic construct
VVAQY

SEQ ID NO: 5497 - protein, 5 aa, synthetic construct
VWDVH

SEQ ID NO: 5498 - protein, 5 aa, synthetic construct
VNYKV

SEQ ID NO: 5499 - protein, 5 aa, synthetic construct
DRGEY

SEQ ID NO: 5500 - protein, 5 aa, synthetic construct
LANMY

SEQ ID NO: 5501 - protein, 5 aa, synthetic construct
ASRWV

SEQ ID NO: 5502 - protein, 5 aa, synthetic construct
VKWLV

SEQ ID NO: 5503 - protein, 5 aa, synthetic construct
GYGML

SEQ ID NO: 5504 - protein, 5 aa, synthetic construct
TGVTY

SEQ ID NO: 5505 - protein, 5 aa, synthetic construct
VRENY

SEQ ID NO: 5506 - protein, 5 aa, synthetic construct
GFKGG

SEQ ID NO: 5507 - protein, 5 aa, synthetic construct
GVTTR

SEQ ID NO: 5508 - protein, 5 aa, synthetic construct
CSREY

SEQ ID NO: 5509 - protein, 5 aa, synthetic construct
RSEVY

SEQ ID NO: 5510 - protein, 5 aa, synthetic construct
EEQVF

SEQ ID NO: 5511 - protein, 5 aa, synthetic construct
GQGDN

SEQ ID NO: 5512 - protein, 5 aa, synthetic construct
RSYDY

SEQ ID NO: 5513 - protein, 5 aa, synthetic construct
GTVVY

SEQ ID NO: 5514 - protein, 5 aa, synthetic construct
GLGTS

SEQ ID NO: 5515 - protein, 5 aa, synthetic construct
GIASR

SEQ ID NO: 5516 - protein, 5 aa, synthetic construct
ARGVF

SEQ ID NO: 5517 - protein, 5 aa, synthetic construct
AIGCY

SEQ ID NO: 5518 - protein, 5 aa, synthetic construct
MLRIY

SEQ ID NO: 5519 - protein, 5 aa, synthetic construct
CQKAY

SEQ ID NO: 5520 - protein, 5 aa, synthetic construct
GNYAY

SEQ ID NO: 5521 - protein, 5 aa, synthetic construct
WDWST

SEQ ID NO: 5522 - protein, 5 aa, synthetic construct
GTGTC

SEQ ID NO: 5523 - protein, 5 aa, synthetic construct
YNGNY

SEQ ID NO: 5524 - protein, 5 aa, synthetic construct
GKNGC

SEQ ID NO: 5525 - protein, 5 aa, synthetic construct
TVGTY

SEQ ID NO: 5526 - protein, 5 aa, synthetic construct
TRYMD

SEQ ID NO: 5527 - protein, 5 aa, synthetic construct
GIRLE

SEQ ID NO: 5528 - protein, 5 aa, synthetic construct
MVVNY

SEQ ID NO: 5529 - protein, 5 aa, synthetic construct
KVQGY

SEQ ID NO: 5530 - protein, 5 aa, synthetic construct
GLAAY

SEQ ID NO: 5531 - protein, 5 aa, synthetic construct
SGTRY

SEQ ID NO: 5532 - protein, 5 aa, synthetic construct
KNALY

SEQ ID NO: 5533 - protein, 5 aa, synthetic construct
GIKYG

SEQ ID NO: 5534 - protein, 5 aa, synthetic construct
ERNGL

SEQ ID NO: 5535 - protein, 5 aa, synthetic construct
GNNAY

SEQ ID NO: 5536 - protein, 5 aa, synthetic construct
GYRFA

SEQ ID NO: 5537 - protein, 5 aa, synthetic construct
GRTTD

SEQ ID NO: 5538 - protein, 5 aa, synthetic construct
GSRSY

SEQ ID NO: 5539 - protein, 5 aa, synthetic construct
WYRYV

SEQ ID NO: 5540 - protein, 5 aa, synthetic construct
GVTEG

SEQ ID NO: 5541 - protein, 5 aa, synthetic construct
SALSY

SEQ ID NO: 5542 - protein, 5 aa, synthetic construct
VRVRY

SEQ ID NO: 5543 - protein, 5 aa, synthetic construct
FTGLY

SEQ ID NO: 5544 - protein, 5 aa, synthetic construct
GFGLN

SEQ ID NO: 5545 - protein, 5 aa, synthetic construct
IEVDT

SEQ ID NO: 5546 - protein, 5 aa, synthetic construct
KIGCE

SEQ ID NO: 5547 - protein, 5 aa, synthetic construct
VPCGR

SEQ ID NO: 5548 - protein, 5 aa, synthetic construct
GNKAE

SEQ ID NO: 5549 - protein, 5 aa, synthetic construct
GASLA

SEQ ID NO: 5550 - protein, 5 aa, synthetic construct
GSEEY

SEQ ID NO: 5551 - protein, 5 aa, synthetic construct
VPGLS

SEQ ID NO: 5552 - protein, 5 aa, synthetic construct
ARSAA

SEQ ID NO: 5553 - protein, 4 aa, synthetic construct
TVLR

SEQ ID NO: 5554 - protein, 5 aa, synthetic construct
GLADY

SEQ ID NO: 5555 - protein, 5 aa, synthetic construct
AHVAY

SEQ ID NO: 5556 - protein, 5 aa, synthetic construct
ANCEY

SEQ ID NO: 5557 - protein, 5 aa, synthetic construct
NRGIY

SEQ ID NO: 5558 - protein, 5 aa, synthetic construct
GFGNA

SEQ ID NO: 5559 - protein, 5 aa, synthetic construct
MSRTY

SEQ ID NO: 5560 - protein, 5 aa, synthetic construct
MQVNY

SEQ ID NO: 5561 - protein, 5 aa, synthetic construct
GRLVL

SEQ ID NO: 5562 - protein, 5 aa, synthetic construct
RVSAY

SEQ ID NO: 5563 - protein, 5 aa, synthetic construct
GYRMI

SEQ ID NO: 5564 - protein, 5 aa, synthetic construct
GVGER

SEQ ID NO: 5565 - protein, 5 aa, synthetic construct
ARYHQ

SEQ ID NO: 5566 - protein, 5 aa, synthetic construct
KMRLY

SEQ ID NO: 5567 - protein, 5 aa, synthetic construct
GKHIY

SEQ ID NO: 5568 - protein, 5 aa, synthetic construct
GTGDY

SEQ ID NO: 5569 - protein, 5 aa, synthetic construct
VISAA

SEQ ID NO: 5570 - protein, 5 aa, synthetic construct
WMREY

SEQ ID NO: 5571 - protein, 5 aa, synthetic construct
GRGCY

SEQ ID NO: 5572 - protein, 5 aa, synthetic construct
MMRFY

SEQ ID NO: 5573 - protein, 5 aa, synthetic construct
GHGCE

SEQ ID NO: 5574 - protein, 5 aa, synthetic construct
TRRGV

SEQ ID NO: 5575 - protein, 5 aa, synthetic construct
GNKRY

SEQ ID NO: 5576 - protein, 5 aa, synthetic construct
FVGNY

SEQ ID NO: 5577 - protein, 5 aa, synthetic construct
GMSTS

SEQ ID NO: 5578 - protein, 5 aa, synthetic construct
GQLRW

SEQ ID NO: 5579 - protein, 5 aa, synthetic construct
GESFY

SEQ ID NO: 5580 - protein, 5 aa, synthetic construct
GFRSL

SEQ ID NO: 5581 - protein, 5 aa, synthetic construct
RIGYY

SEQ ID NO: 5582 - protein, 5 aa, synthetic construct
VRFRK

SEQ ID NO: 5583 - protein, 5 aa, synthetic construct
RDVTY

SEQ ID NO: 5584 - protein, 5 aa, synthetic construct
EWNLL

SEQ ID NO: 5585 - protein, 5 aa, synthetic construct
IDVGD

SEQ ID NO: 5586 - protein, 5 aa, synthetic construct
GHDKY

SEQ ID NO: 5587 - protein, 5 aa, synthetic construct
VRTDY

SEQ ID NO: 5588 - protein, 5 aa, synthetic construct
AYRWY

SEQ ID NO: 5589 - protein, 5 aa, synthetic construct
GTMTY

SEQ ID NO: 5590 - protein, 5 aa, synthetic construct
HSAEY

SEQ ID NO: 5591 - protein, 5 aa, synthetic construct
EVRGY

SEQ ID NO: 5592 - protein, 5 aa, synthetic construct
GVGNY

SEQ ID NO: 5593 - protein, 5 aa, synthetic construct
VKQVY

SEQ ID NO: 5594 - protein, 5 aa, synthetic construct
GHGGT

SEQ ID NO: 5595 - protein, 5 aa, synthetic construct
GTHDY

SEQ ID NO: 5596 - protein, 5 aa, synthetic construct
YSQAA

SEQ ID NO: 5597 - protein, 5 aa, synthetic construct
GLSFY

SEQ ID NO: 5598 - protein, 5 aa, synthetic construct
AFHDY

SEQ ID NO: 5599 - protein, 5 aa, synthetic construct
VDLAY

SEQ ID NO: 5600 - protein, 5 aa, synthetic construct
WWMGD

SEQ ID NO: 5601 - protein, 4 aa, synthetic construct
GYSM

SEQ ID NO: 5602 - protein, 5 aa, synthetic construct
VNVAY

SEQ ID NO: 5603 - protein, 5 aa, synthetic construct
GREYA

SEQ ID NO: 5604 - protein, 5 aa, synthetic construct
MRVSY

SEQ ID NO: 5605 - protein, 5 aa, synthetic construct
VKCNK

SEQ ID NO: 5606 - protein, 5 aa, synthetic construct
GFDDN

SEQ ID NO: 5607 - protein, 5 aa, synthetic construct
VRDFY

SEQ ID NO: 5608 - protein, 5 aa, synthetic construct
GNRAS

SEQ ID NO: 5609 - protein, 5 aa, synthetic construct
GVSEY

SEQ ID NO: 5610 - protein, 5 aa, synthetic construct
GWGMR

SEQ ID NO: 5611 - protein, 5 aa, synthetic construct
GTWLG

SEQ ID NO: 5612 - protein, 5 aa, synthetic construct
VFHSI

SEQ ID NO: 5613 - protein, 5 aa, synthetic construct
MQNGY

SEQ ID NO: 5614 - protein, 5 aa, synthetic construct
GMGSV

SEQ ID NO: 5615 - protein, 5 aa, synthetic construct
MIRGY

SEQ ID NO: 5616 - protein, 5 aa, synthetic construct
GFNLV

SEQ ID NO: 5617 - protein, 5 aa, synthetic construct
WRRDY

SEQ ID NO: 5618 - protein, 5 aa, synthetic construct
GGDIY

SEQ ID NO: 5619 - protein, 5 aa, synthetic construct
SACVY

SEQ ID NO: 5620 - protein, 5 aa, synthetic construct
TTTGG

SEQ ID NO: 5621 - protein, 5 aa, synthetic construct
MHKVY

SEQ ID NO: 5622 - protein, 5 aa, synthetic construct
GQTVY

SEQ ID NO: 5623 - protein, 5 aa, synthetic construct
VHGGL

SEQ ID NO: 5624 - protein, 5 aa, synthetic construct
TRLQY

SEQ ID NO: 5625 - protein, 5 aa, synthetic construct
GNAGM

SEQ ID NO: 5626 - protein, 5 aa, synthetic construct
MQRVG

SEQ ID NO: 5627 - protein, 5 aa, synthetic construct
KTAIY

SEQ ID NO: 5628 - protein, 5 aa, synthetic construct
ARVGM

SEQ ID NO: 5629 - protein, 5 aa, synthetic construct
GLYIW

SEQ ID NO: 5630 - protein, 5 aa, synthetic construct
SHWND

SEQ ID NO: 5631 - protein, 5 aa, synthetic construct
FSHDG

SEQ ID NO: 5632 - protein, 5 aa, synthetic construct
GKVGL

SEQ ID NO: 5633 - protein, 5 aa, synthetic construct
VPFGN

SEQ ID NO: 5634 - protein, 5 aa, synthetic construct
GFHET

SEQ ID NO: 5635 - protein, 5 aa, synthetic construct
GRDGD

SEQ ID NO: 5636 - protein, 5 aa, synthetic construct
GKMSD

SEQ ID NO: 5637 - protein, 5 aa, synthetic construct
TLRGI

SEQ ID NO: 5638 - protein, 5 aa, synthetic construct
GVHNY

SEQ ID NO: 5639 - protein, 5 aa, synthetic construct
SNWNS

SEQ ID NO: 5640 - protein, 5 aa, synthetic construct
GNDGG

SEQ ID NO: 5641 - protein, 5 aa, synthetic construct
LGRGV

SEQ ID NO: 5642 - protein, 5 aa, synthetic construct
GVSIL

SEQ ID NO: 5643 - protein, 5 aa, synthetic construct
WGLGA

SEQ ID NO: 5644 - protein, 5 aa, synthetic construct
CQVRY

SEQ ID NO: 5645 - protein, 5 aa, synthetic construct
RVRTY

SEQ ID NO: 5646 - protein, 5 aa, synthetic construct
GAGSF

SEQ ID NO: 5647 - protein, 4 aa, synthetic construct
MRGL

SEQ ID NO: 5648 - protein, 5 aa, synthetic construct
MKLDY

SEQ ID NO: 5649 - protein, 5 aa, synthetic construct
VKVHA

SEQ ID NO: 5650 - protein, 5 aa, synthetic construct
GARHV

SEQ ID NO: 5651 - protein, 5 aa, synthetic construct
GTAGV

SEQ ID NO: 5652 - protein, 5 aa, synthetic construct
MQAYY

SEQ ID NO: 5653 - protein, 5 aa, synthetic construct
VRNGG

SEQ ID NO: 5654 - protein, 5 aa, synthetic construct
VAGSY

SEQ ID NO: 5655 - protein, 5 aa, synthetic construct
WDTVD

SEQ ID NO: 5656 - protein, 5 aa, synthetic construct
QHADY

SEQ ID NO: 5657 - protein, 5 aa, synthetic construct
GRAVG

SEQ ID NO: 5658 - protein, 5 aa, synthetic construct
VATGT

SEQ ID NO: 5659 - protein, 5 aa, synthetic construct
SVGAN

SEQ ID NO: 5660 - protein, 4 aa, synthetic construct
VDGY

SEQ ID NO: 5661 - protein, 5 aa, synthetic construct
ESRSS

SEQ ID NO: 5662 - protein, 5 aa, synthetic construct
GKGLS

SEQ ID NO: 5663 - protein, 5 aa, synthetic construct
VRARH

SEQ ID NO: 5664 - protein, 5 aa, synthetic construct
NRSSY

SEQ ID NO: 5665 - protein, 5 aa, synthetic construct
GFQGS

SEQ ID NO: 5666 - protein, 5 aa, synthetic construct
GQGWY

SEQ ID NO: 5667 - protein, 5 aa, synthetic construct
WRDWG

SEQ ID NO: 5668 - protein, 5 aa, synthetic construct
GSNHY

SEQ ID NO: 5669 - protein, 5 aa, synthetic construct
TRIGY

SEQ ID NO: 5670 - protein, 5 aa, synthetic construct
ARTSY

SEQ ID NO: 5671 - protein, 5 aa, synthetic construct
SLRIY

SEQ ID NO: 5672 - protein, 5 aa, synthetic construct
MRSLY

SEQ ID NO: 5673 - protein, 5 aa, synthetic construct
NWGGY

SEQ ID NO: 5674 - protein, 5 aa, synthetic construct
GWVNQ

SEQ ID NO: 5675 - protein, 5 aa, synthetic construct
LRSTY

SEQ ID NO: 5676 - protein, 5 aa, synthetic construct
DGGGY

SEQ ID NO: 5677 - protein, 5 aa, synthetic construct
RRQYY

SEQ ID NO: 5678 - protein, 4 aa, synthetic construct
NAGD

SEQ ID NO: 5679 - protein, 5 aa, synthetic construct
ARGGY

SEQ ID NO: 5680 - protein, 5 aa, synthetic construct
VMGGY

SEQ ID NO: 5681 - protein, 5 aa, synthetic construct
VSQLY

SEQ ID NO: 5682 - protein, 5 aa, synthetic construct
DGALQ

SEQ ID NO: 5683 - protein, 5 aa, synthetic construct
GKGKY

SEQ ID NO: 5684 - protein, 5 aa, synthetic construct
VAGAY

SEQ ID NO: 5685 - protein, 5 aa, synthetic construct
GVNVY

SEQ ID NO: 5686 - protein, 5 aa, synthetic construct
SGHTY

SEQ ID NO: 5687 - protein, 5 aa, synthetic construct
GFGQG

SEQ ID NO: 5688 - protein, 5 aa, synthetic construct
GVDSM

SEQ ID NO: 5689 - protein, 5 aa, synthetic construct
KTTAY

SEQ ID NO: 5690 - protein, 5 aa, synthetic construct
WHGDY

SEQ ID NO: 5691 - protein, 5 aa, synthetic construct
MRSVH

SEQ ID NO: 5692 - protein, 5 aa, synthetic construct
GFDFY

SEQ ID NO: 5693 - protein, 5 aa, synthetic construct
VNDSS

SEQ ID NO: 5694 - protein, 5 aa, synthetic construct
GAKDY

SEQ ID NO: 5695 - protein, 5 aa, synthetic construct
VPYRH

SEQ ID NO: 5696 - protein, 5 aa, synthetic construct
AHSDY

SEQ ID NO: 5697 - protein, 5 aa, synthetic construct
TRFPL

SEQ ID NO: 5698 - protein, 5 aa, synthetic construct
GSWGH

SEQ ID NO: 5699 - protein, 5 aa, synthetic construct
VVNIY

SEQ ID NO: 5700 - protein, 5 aa, synthetic construct
MRGNV

SEQ ID NO: 5701 - protein, 5 aa, synthetic construct
GHRTG

SEQ ID NO: 5702 - protein, 5 aa, synthetic construct
GTKRY

SEQ ID NO: 5703 - protein, 5 aa, synthetic construct
QVTAY

SEQ ID NO: 5704 - protein, 5 aa, synthetic construct
CWTTY

SEQ ID NO: 5705 - protein, 5 aa, synthetic construct
AGDVY

SEQ ID NO: 5706 - protein, 5 aa, synthetic construct
GELDR

SEQ ID NO: 5707 - protein, 5 aa, synthetic construct
INRVY

SEQ ID NO: 5708 - protein, 5 aa, synthetic construct
GSKNY

SEQ ID NO: 5709 - protein, 5 aa, synthetic construct
GGHAS

SEQ ID NO: 5710 - protein, 5 aa, synthetic construct
GIAVN

SEQ ID NO: 5711 - protein, 5 aa, synthetic construct
VAWSN

SEQ ID NO: 5712 - protein, 5 aa, synthetic construct
GRKDY

SEQ ID NO: 5713 - protein, 5 aa, synthetic construct
VNLVY

SEQ ID NO: 5714 - protein, 5 aa, synthetic construct
GVGVF

SEQ ID NO: 5715 - protein, 5 aa, synthetic construct
GGSVY

SEQ ID NO: 5716 - protein, 5 aa, synthetic construct
FWYSG

SEQ ID NO: 5717 - protein, 5 aa, synthetic construct
GHGAD

SEQ ID NO: 5718 - protein, 5 aa, synthetic construct
VRHAI

SEQ ID NO: 5719 - protein, 5 aa, synthetic construct
GNLVY

SEQ ID NO: 5720 - protein, 5 aa, synthetic construct
ASTDY

SEQ ID NO: 5721 - protein, 5 aa, synthetic construct
GSTRY

SEQ ID NO: 5722 - protein, 5 aa, synthetic construct
GISIY

SEQ ID NO: 5723 - protein, 5 aa, synthetic construct
VKQTY

SEQ ID NO: 5724 - protein, 5 aa, synthetic construct
TLGAV

SEQ ID NO: 5725 - protein, 5 aa, synthetic construct
STGMV

SEQ ID NO: 5726 - protein, 5 aa, synthetic construct
EVRKY

SEQ ID NO: 5727 - protein, 5 aa, synthetic construct
GRVMY

SEQ ID NO: 5728 - protein, 5 aa, synthetic construct
RNSTY

SEQ ID NO: 5729 - protein, 5 aa, synthetic construct
IRSDY

SEQ ID NO: 5730 - protein, 5 aa, synthetic construct
ATDYA

SEQ ID NO: 5731 - protein, 5 aa, synthetic construct
GTVGH

SEQ ID NO: 5732 - protein, 5 aa, synthetic construct
VRGHY

SEQ ID NO: 5733 - protein, 5 aa, synthetic construct
VRDLD

SEQ ID NO: 5734 - protein, 5 aa, synthetic construct
DDGRD

SEQ ID NO: 5735 - protein, 5 aa, synthetic construct
GGTMA

SEQ ID NO: 5736 - protein, 5 aa, synthetic construct
TAAGY

SEQ ID NO: 5737 - protein, 5 aa, synthetic construct
LRYVG

SEQ ID NO: 5738 - protein, 5 aa, synthetic construct
GVGDP

SEQ ID NO: 5739 - protein, 5 aa, synthetic construct
NDDLY

SEQ ID NO: 5740 - protein, 5 aa, synthetic construct
GDEIY

SEQ ID NO: 5741 - protein, 5 aa, synthetic construct
WGSQY

SEQ ID NO: 5742 - protein, 5 aa, synthetic construct
GGLGY

SEQ ID NO: 5743 - protein, 5 aa, synthetic construct
VHQIY

SEQ ID NO: 5744 - protein, 5 aa, synthetic construct
GRGEL

SEQ ID NO: 5745 - protein, 5 aa, synthetic construct
SLSAY

SEQ ID NO: 5746 - protein, 5 aa, synthetic construct
VGRSY

SEQ ID NO: 5747 - protein, 5 aa, synthetic construct
GTRTV

SEQ ID NO: 5748 - protein, 5 aa, synthetic construct
AMGGY

SEQ ID NO: 5749 - protein, 5 aa, synthetic construct
GYSCF

SEQ ID NO: 5750 - protein, 5 aa, synthetic construct
IVSVY

SEQ ID NO: 5751 - protein, 5 aa, synthetic construct
NSDIY

SEQ ID NO: 5752 - protein, 5 aa, synthetic construct
VRWGD

SEQ ID NO: 5753 - protein, 5 aa, synthetic construct
AIGAL

SEQ ID NO: 5754 - protein, 5 aa, synthetic construct
MLHQV

SEQ ID NO: 5755 - protein, 5 aa, synthetic construct
DFHEV

SEQ ID NO: 5756 - protein, 5 aa, synthetic construct
VRRSY

SEQ ID NO: 5757 - protein, 5 aa, synthetic construct
GRDGV

SEQ ID NO: 5758 - protein, 5 aa, synthetic construct
GFLID

SEQ ID NO: 5759 - protein, 5 aa, synthetic construct
CRHNY

SEQ ID NO: 5760 - protein, 5 aa, synthetic construct
GMYHY

SEQ ID NO: 5761 - protein, 5 aa, synthetic construct
YPHHV

SEQ ID NO: 5762 - protein, 5 aa, synthetic construct
DHRIY

SEQ ID NO: 5763 - protein, 5 aa, synthetic construct
VAFDE

SEQ ID NO: 5764 - protein, 5 aa, synthetic construct
VRHFE

SEQ ID NO: 5765 - protein, 5 aa, synthetic construct
YAGTY

SEQ ID NO: 5766 - protein, 5 aa, synthetic construct
NRREY

SEQ ID NO: 5767 - protein, 5 aa, synthetic construct
KSLEY

SEQ ID NO: 5768 - protein, 5 aa, synthetic construct
VRDNG

SEQ ID NO: 5769 - protein, 5 aa, synthetic construct
RNVGY

SEQ ID NO: 5770 - protein, 5 aa, synthetic construct
GGGQY

SEQ ID NO: 5771 - protein, 5 aa, synthetic construct
MGATY

SEQ ID NO: 5772 - protein, 5 aa, synthetic construct
KECGP

SEQ ID NO: 5773 - protein, 5 aa, synthetic construct
VRNVM

SEQ ID NO: 5774 - protein, 5 aa, synthetic construct
SQGDV

SEQ ID NO: 5775 - protein, 5 aa, synthetic construct
CKNVY

SEQ ID NO: 5776 - protein, 5 aa, synthetic construct
CVGAY

SEQ ID NO: 5777 - protein, 4 aa, synthetic construct
RHSL

SEQ ID NO: 5778 - protein, 5 aa, synthetic construct
IKGNN

SEQ ID NO: 5779 - protein, 5 aa, synthetic construct
NSSVY

SEQ ID NO: 5780 - protein, 5 aa, synthetic construct
ATRLY

SEQ ID NO: 5781 - protein, 5 aa, synthetic construct
ARNTY

SEQ ID NO: 5782 - protein, 5 aa, synthetic construct
ARGRA

SEQ ID NO: 5783 - protein, 5 aa, synthetic construct
GGSEY

SEQ ID NO: 5784 - protein, 5 aa, synthetic construct
VACRY

SEQ ID NO: 5785 - protein, 5 aa, synthetic construct
ENVYY

SEQ ID NO: 5786 - protein, 5 aa, synthetic construct
GIGDN

SEQ ID NO: 5787 - protein, 5 aa, synthetic construct
GMGCL

SEQ ID NO: 5788 - protein, 5 aa, synthetic construct
GTTEY

SEQ ID NO: 5789 - protein, 5 aa, synthetic construct
GSITY

SEQ ID NO: 5790 - protein, 4 aa, synthetic construct
IDMS

SEQ ID NO: 5791 - protein, 5 aa, synthetic construct
ARTAS

SEQ ID NO: 5792 - protein, 5 aa, synthetic construct
GGMGS

SEQ ID NO: 5793 - protein, 5 aa, synthetic construct
GVSTY

SEQ ID NO: 5794 - protein, 5 aa, synthetic construct
RRSEY

SEQ ID NO: 5795 - protein, 5 aa, synthetic construct
VNHDR

SEQ ID NO: 5796 - protein, 5 aa, synthetic construct
NGNDY

SEQ ID NO: 5797 - protein, 5 aa, synthetic construct
ARTVY

SEQ ID NO: 5798 - protein, 5 aa, synthetic construct
NGSCC

SEQ ID NO: 5799 - protein, 5 aa, synthetic construct
GSDGY

SEQ ID NO: 5800 - protein, 5 aa, synthetic construct
TFARL

SEQ ID NO: 5801 - protein, 5 aa, synthetic construct
VGSTN

SEQ ID NO: 5802 - protein, 5 aa, synthetic construct
GLSAY

SEQ ID NO: 5803 - protein, 5 aa, synthetic construct
GTDFW

SEQ ID NO: 5804 - protein, 5 aa, synthetic construct
TRAAR

SEQ ID NO: 5805 - protein, 5 aa, synthetic construct
GRARY

SEQ ID NO: 5806 - protein, 5 aa, synthetic construct
AAYVY

SEQ ID NO: 5807 - protein, 5 aa, synthetic construct
GIWDG

SEQ ID NO: 5808 - protein, 5 aa, synthetic construct
GISTY

SEQ ID NO: 5809 - protein, 5 aa, synthetic construct
GKLTG

SEQ ID NO: 5810 - protein, 5 aa, synthetic construct
GLYIA

SEQ ID NO: 5811 - protein, 5 aa, synthetic construct
GSAVY

SEQ ID NO: 5812 - protein, 5 aa, synthetic construct
TNMDY

SEQ ID NO: 5813 - protein, 5 aa, synthetic construct
GNLNT

SEQ ID NO: 5814 - protein, 5 aa, synthetic construct
SSAEY

SEQ ID NO: 5815 - protein, 5 aa, synthetic construct
SQADY

SEQ ID NO: 5816 - protein, 5 aa, synthetic construct
STKAS

SEQ ID NO: 5817 - protein, 5 aa, synthetic construct
GIRFQ

SEQ ID NO: 5818 - protein, 5 aa, synthetic construct
RNSAT

SEQ ID NO: 5819 - protein, 5 aa, synthetic construct
RRGGS

SEQ ID NO: 5820 - protein, 5 aa, synthetic construct
VREGD

SEQ ID NO: 5821 - protein, 5 aa, synthetic construct
GTNEY

SEQ ID NO: 5822 - protein, 5 aa, synthetic construct
SRMAY

SEQ ID NO: 5823 - protein, 5 aa, synthetic construct
VRGTY

SEQ ID NO: 5824 - protein, 5 aa, synthetic construct
GLTVY

SEQ ID NO: 5825 - protein, 5 aa, synthetic construct
GFRTV

SEQ ID NO: 5826 - protein, 5 aa, synthetic construct
GRGSY

SEQ ID NO: 5827 - protein, 5 aa, synthetic construct
TRAAY

SEQ ID NO: 5828 - protein, 5 aa, synthetic construct
GWSGF

SEQ ID NO: 5829 - protein, 5 aa, synthetic construct
VRMLD

SEQ ID NO: 5830 - protein, 5 aa, synthetic construct
GFRIY

SEQ ID NO: 5831 - protein, 5 aa, synthetic construct
GNHTT

SEQ ID NO: 5832 - protein, 5 aa, synthetic construct
GSTWY

SEQ ID NO: 5833 - protein, 5 aa, synthetic construct
FVGVE

SEQ ID NO: 5834 - protein, 5 aa, synthetic construct
GYTVY

SEQ ID NO: 5835 - protein, 5 aa, synthetic construct
GVGFF

SEQ ID NO: 5836 - protein, 5 aa, synthetic construct
AEANY

SEQ ID NO: 5837 - protein, 5 aa, synthetic construct
TNTVH

SEQ ID NO: 5838 - protein, 5 aa, synthetic construct
VRGLS

SEQ ID NO: 5839 - protein, 5 aa, synthetic construct
GTDSG

SEQ ID NO: 5840 - protein, 5 aa, synthetic construct
GTGEL

SEQ ID NO: 5841 - protein, 5 aa, synthetic construct
GSSGY

SEQ ID NO: 5842 - protein, 5 aa, synthetic construct
GQDHM

SEQ ID NO: 5843 - protein, 5 aa, synthetic construct
GNDWY

SEQ ID NO: 5844 - protein, 5 aa, synthetic construct
GAGIS

SEQ ID NO: 5845 - protein, 5 aa, synthetic construct
GNEVY

SEQ ID NO: 5846 - protein, 5 aa, synthetic construct
YQGAY

SEQ ID NO: 5847 - protein, 5 aa, synthetic construct
GEGAI

SEQ ID NO: 5848 - protein, 5 aa, synthetic construct
IRLGF

SEQ ID NO: 5849 - protein, 5 aa, synthetic construct
SNNAY

SEQ ID NO: 5850 - protein, 5 aa, synthetic construct
SNAHY

SEQ ID NO: 5851 - protein, 5 aa, synthetic construct
VNHSV

SEQ ID NO: 5852 - protein, 5 aa, synthetic construct
RDGGY

SEQ ID NO: 5853 - protein, 5 aa, synthetic construct
GMCAN

SEQ ID NO: 5854 - protein, 5 aa, synthetic construct
TMDVA

SEQ ID NO: 5855 - protein, 5 aa, synthetic construct
GTKVA

SEQ ID NO: 5856 - protein, 5 aa, synthetic construct
AADRY

SEQ ID NO: 5857 - protein, 5 aa, synthetic construct
GNGAS

SEQ ID NO: 5858 - protein, 5 aa, synthetic construct
RLGEY

SEQ ID NO: 5859 - protein, 5 aa, synthetic construct
SQGEY

SEQ ID NO: 5860 - protein, 5 aa, synthetic construct
GTDCY

SEQ ID NO: 5861 - protein, 5 aa, synthetic construct
ALCGA

SEQ ID NO: 5862 - protein, 5 aa, synthetic construct
SGYVA

SEQ ID NO: 5863 - protein, 5 aa, synthetic construct
AKGQY

SEQ ID NO: 5864 - protein, 5 aa, synthetic construct
GYGHY

SEQ ID NO: 5865 - protein, 5 aa, synthetic construct
MMRAY

SEQ ID NO: 5866 - protein, 5 aa, synthetic construct
DRIDV

SEQ ID NO: 5867 - protein, 5 aa, synthetic construct
IRVLY

SEQ ID NO: 5868 - protein, 5 aa, synthetic construct
SVSIY

SEQ ID NO: 5869 - protein, 5 aa, synthetic construct
GRVLY

SEQ ID NO: 5870 - protein, 5 aa, synthetic construct
GMGNY

SEQ ID NO: 5871 - protein, 5 aa, synthetic construct
IGNRY

SEQ ID NO: 5872 - protein, 5 aa, synthetic construct
APTLQ

SEQ ID NO: 5873 - protein, 5 aa, synthetic construct
VHRGH

SEQ ID NO: 5874 - protein, 5 aa, synthetic construct
CVGTY

SEQ ID NO: 5875 - protein, 5 aa, synthetic construct
VRGNA

SEQ ID NO: 5876 - protein, 5 aa, synthetic construct
CRFSY

SEQ ID NO: 5877 - protein, 5 aa, synthetic construct
GWACL

SEQ ID NO: 5878 - protein, 5 aa, synthetic construct
RSLDY

SEQ ID NO: 5879 - protein, 5 aa, synthetic construct
NSEAY

SEQ ID NO: 5880 - protein, 5 aa, synthetic construct
MRGAY

SEQ ID NO: 5881 - protein, 5 aa, synthetic construct
VKHLV

SEQ ID NO: 5882 - protein, 5 aa, synthetic construct
YWRNY

SEQ ID NO: 5883 - protein, 5 aa, synthetic construct
GVDFS

SEQ ID NO: 5884 - protein, 5 aa, synthetic construct
TGDDV

SEQ ID NO: 5885 - protein, 5 aa, synthetic construct
ANMQY

SEQ ID NO: 5886 - protein, 5 aa, synthetic construct
VPWLI

SEQ ID NO: 5887 - protein, 5 aa, synthetic construct
ANQDY

SEQ ID NO: 5888 - protein, 5 aa, synthetic construct
VQEHY

SEQ ID NO: 5889 - protein, 5 aa, synthetic construct
GFLQL

SEQ ID NO: 5890 - protein, 5 aa, synthetic construct
RSVDY

SEQ ID NO: 5891 - protein, 5 aa, synthetic construct
CMREY

SEQ ID NO: 5892 - protein, 5 aa, synthetic construct
SNWGY

SEQ ID NO: 5893 - protein, 5 aa, synthetic construct
GGSAY

SEQ ID NO: 5894 - protein, 5 aa, synthetic construct
IGNWY

SEQ ID NO: 5895 - protein, 5 aa, synthetic construct
TARTY

SEQ ID NO: 5896 - protein, 5 aa, synthetic construct
GRDGY

SEQ ID NO: 5897 - protein, 5 aa, synthetic construct
SRDLE

SEQ ID NO: 5898 - protein, 5 aa, synthetic construct
TRWTY

SEQ ID NO: 5899 - protein, 5 aa, synthetic construct
CRGSY

SEQ ID NO: 5900 - protein, 5 aa, synthetic construct
GRTFY

SEQ ID NO: 5901 - protein, 5 aa, synthetic construct
VRRGM

SEQ ID NO: 5902 - protein, 5 aa, synthetic construct
GNTDG

SEQ ID NO: 5903 - protein, 5 aa, synthetic construct
YGVTY

SEQ ID NO: 5904 - protein, 5 aa, synthetic construct
DDKTY

SEQ ID NO: 5905 - protein, 5 aa, synthetic construct
TPDRY

SEQ ID NO: 5906 - protein, 5 aa, synthetic construct
GYDGY

SEQ ID NO: 5907 - protein, 5 aa, synthetic construct
GRCAG

SEQ ID NO: 5908 - protein, 4 aa, synthetic construct
SQQI

SEQ ID NO: 5909 - protein, 5 aa, synthetic construct
MQSRY

SEQ ID NO: 5910 - protein, 5 aa, synthetic construct
MGRTY

SEQ ID NO: 5911 - protein, 5 aa, synthetic construct
VSGDY

SEQ ID NO: 5912 - protein, 5 aa, synthetic construct
KRGAY

SEQ ID NO: 5913 - protein, 4 aa, synthetic construct
FGFN

SEQ ID NO: 5914 - protein, 5 aa, synthetic construct
GQGSY

SEQ ID NO: 5915 - protein, 5 aa, synthetic construct
TLANY

SEQ ID NO: 5916 - protein, 5 aa, synthetic construct
IVAQY

SEQ ID NO: 5917 - protein, 5 aa, synthetic construct
GTFTY

SEQ ID NO: 5918 - protein, 5 aa, synthetic construct
GRRDD

SEQ ID NO: 5919 - protein, 5 aa, synthetic construct
MQTAY

SEQ ID NO: 5920 - protein, 5 aa, synthetic construct
VVAGT

SEQ ID NO: 5921 - protein, 5 aa, synthetic construct
TLDGV

SEQ ID NO: 5922 - protein, 5 aa, synthetic construct
NVSIY

SEQ ID NO: 5923 - protein, 5 aa, synthetic construct
GQTRY

SEQ ID NO: 5924 - protein, 5 aa, synthetic construct
SVVRY

SEQ ID NO: 5925 - protein, 5 aa, synthetic construct
NVFIY

SEQ ID NO: 5926 - protein, 5 aa, synthetic construct
GNVMG

SEQ ID NO: 5927 - protein, 5 aa, synthetic construct
CIDME

SEQ ID NO: 5928 - protein, 4 aa, synthetic construct
KGVY

SEQ ID NO: 5929 - protein, 5 aa, synthetic construct
ERVDY

SEQ ID NO: 5930 - protein, 5 aa, synthetic construct
MAYVA

SEQ ID NO: 5931 - protein, 5 aa, synthetic construct
KDDAY

SEQ ID NO: 5932 - protein, 5 aa, synthetic construct
ANGGY

SEQ ID NO: 5933 - protein, 5 aa, synthetic construct
GVSEW

SEQ ID NO: 5934 - protein, 5 aa, synthetic construct
YNHRC

SEQ ID NO: 5935 - protein, 5 aa, synthetic construct
GFANT

SEQ ID NO: 5936 - protein, 5 aa, synthetic construct
GQVYW

SEQ ID NO: 5937 - protein, 5 aa, synthetic construct
LKVRY

SEQ ID NO: 5938 - protein, 5 aa, synthetic construct
GGKTY

SEQ ID NO: 5939 - protein, 5 aa, synthetic construct
AGHFY

SEQ ID NO: 5940 - protein, 5 aa, synthetic construct
GAYFY

SEQ ID NO: 5941 - protein, 5 aa, synthetic construct
RTCSY

SEQ ID NO: 5942 - protein, 5 aa, synthetic construct
VVRGW

SEQ ID NO: 5943 - protein, 5 aa, synthetic construct
MQGNL

SEQ ID NO: 5944 - protein, 5 aa, synthetic construct
TRRLY

SEQ ID NO: 5945 - protein, 4 aa, synthetic construct
VNGG

SEQ ID NO: 5946 - protein, 5 aa, synthetic construct
LRRNG

SEQ ID NO: 5947 - protein, 5 aa, synthetic construct
GHTTY

SEQ ID NO: 5948 - protein, 5 aa, synthetic construct
AHAVY

SEQ ID NO: 5949 - protein, 5 aa, synthetic construct
NARYY

SEQ ID NO: 5950 - protein, 5 aa, synthetic construct
MKTGA

SEQ ID NO: 5951 - protein, 5 aa, synthetic construct
RQGNY

SEQ ID NO: 5952 - protein, 5 aa, synthetic construct
GKCAY

SEQ ID NO: 5953 - protein, 5 aa, synthetic construct
GHALY

SEQ ID NO: 5954 - protein, 5 aa, synthetic construct
VAHAL

SEQ ID NO: 5955 - protein, 5 aa, synthetic construct
GMGGY

SEQ ID NO: 5956 - protein, 5 aa, synthetic construct
RTIAY

SEQ ID NO: 5957 - protein, 5 aa, synthetic construct
SRGDY

SEQ ID NO: 5958 - protein, 5 aa, synthetic construct
GKVNY

SEQ ID NO: 5959 - protein, 5 aa, synthetic construct
SGTND

SEQ ID NO: 5960 - protein, 5 aa, synthetic construct
GKQWY

SEQ ID NO: 5961 - protein, 5 aa, synthetic construct
GWVSY

SEQ ID NO: 5962 - protein, 5 aa, synthetic construct
GVRHY

SEQ ID NO: 5963 - protein, 5 aa, synthetic construct
ARHAH

SEQ ID NO: 5964 - protein, 5 aa, synthetic construct
LYCHY

SEQ ID NO: 5965 - protein, 5 aa, synthetic construct
GRSKY

SEQ ID NO: 5966 - protein, 6 aa, synthetic construct
CLGTEY

SEQ ID NO: 5967 - protein, 5 aa, synthetic construct
VFVSR

SEQ ID NO: 5968 - protein, 5 aa, synthetic construct
GTGNS

SEQ ID NO: 5969 - protein, 5 aa, synthetic construct
VKGHV

SEQ ID NO: 5970 - protein, 5 aa, synthetic construct
GIGQY

SEQ ID NO: 5971 - protein, 5 aa, synthetic construct
TRVAY

SEQ ID NO: 5972 - protein, 5 aa, synthetic construct
HTGDY

SEQ ID NO: 5973 - protein, 5 aa, synthetic construct
GGAWV

SEQ ID NO: 5974 - protein, 5 aa, synthetic construct
VGQRG

SEQ ID NO: 5975 - protein, 4 aa, synthetic construct
LPVW

SEQ ID NO: 5976 - protein, 5 aa, synthetic construct
GTRPY

SEQ ID NO: 5977 - protein, 5 aa, synthetic construct
RSKAY

SEQ ID NO: 5978 - protein, 5 aa, synthetic construct
MTQAY

SEQ ID NO: 5979 - protein, 5 aa, synthetic construct
GHSLF

SEQ ID NO: 5980 - protein, 5 aa, synthetic construct
SVVTY

SEQ ID NO: 5981 - protein, 5 aa, synthetic construct
IMRGY

SEQ ID NO: 5982 - protein, 5 aa, synthetic construct
GRAYW

SEQ ID NO: 5983 - protein, 5 aa, synthetic construct
WKDSG

SEQ ID NO: 5984 - protein, 5 aa, synthetic construct
GAGGY

SEQ ID NO: 5985 - protein, 5 aa, synthetic construct
AALHY

SEQ ID NO: 5986 - protein, 4 aa, synthetic construct
DVGD

SEQ ID NO: 5987 - protein, 5 aa, synthetic construct
MRYDY

SEQ ID NO: 5988 - protein, 5 aa, synthetic construct
GRASA

SEQ ID NO: 5989 - protein, 5 aa, synthetic construct
GMTTY

SEQ ID NO: 5990 - protein, 5 aa, synthetic construct
GSDLN

SEQ ID NO: 5991 - protein, 5 aa, synthetic construct
GTIGM

SEQ ID NO: 5992 - protein, 5 aa, synthetic construct
MRRIY

SEQ ID NO: 5993 - protein, 5 aa, synthetic construct
GISRY

SEQ ID NO: 5994 - protein, 5 aa, synthetic construct
DGGHY

SEQ ID NO: 5995 - protein, 5 aa, synthetic construct
GANRY

SEQ ID NO: 5996 - protein, 5 aa, synthetic construct
NTASY

SEQ ID NO: 5997 - protein, 5 aa, synthetic construct
GSRTM

SEQ ID NO: 5998 - protein, 5 aa, synthetic construct
MRDAI

SEQ ID NO: 5999 - protein, 4 aa, synthetic construct
AMAE

SEQ ID NO: 6000 - protein, 5 aa, synthetic construct
VQRIY

SEQ ID NO: 6001 - protein, 5 aa, synthetic construct
EKARR

SEQ ID NO: 6002 - protein, 5 aa, synthetic construct
GGSRT

SEQ ID NO: 6003 - protein, 5 aa, synthetic construct
GIDNL

SEQ ID NO: 6004 - protein, 5 aa, synthetic construct
VSALY

SEQ ID NO: 6005 - protein, 5 aa, synthetic construct
RNDRY

SEQ ID NO: 6006 - protein, 5 aa, synthetic construct
AAVAR

SEQ ID NO: 6007 - protein, 5 aa, synthetic construct
GNSFA

SEQ ID NO: 6008 - protein, 5 aa, synthetic construct
GNNGF

SEQ ID NO: 6009 - protein, 5 aa, synthetic construct
GGMRY

SEQ ID NO: 6010 - protein, 5 aa, synthetic construct
GVGSV

SEQ ID NO: 6011 - protein, 5 aa, synthetic construct
RRLDY

SEQ ID NO: 6012 - protein, 5 aa, synthetic construct
GAMGG

SEQ ID NO: 6013 - protein, 5 aa, synthetic construct
GVGLY

SEQ ID NO: 6014 - protein, 5 aa, synthetic construct
IYGNT

SEQ ID NO: 6015 - protein, 5 aa, synthetic construct
VWKVY

SEQ ID NO: 6016 - protein, 5 aa, synthetic construct
MRGYY

SEQ ID NO: 6017 - protein, 5 aa, synthetic construct
GGMDY

SEQ ID NO: 6018 - protein, 5 aa, synthetic construct
VRHRV

SEQ ID NO: 6019 - protein, 5 aa, synthetic construct
VRGIL

SEQ ID NO: 6020 - protein, 5 aa, synthetic construct
GTGNR

SEQ ID NO: 6021 - protein, 5 aa, synthetic construct
GRRDY

SEQ ID NO: 6022 - protein, 5 aa, synthetic construct
ESRNY

SEQ ID NO: 6023 - protein, 5 aa, synthetic construct
GNTDY

SEQ ID NO: 6024 - protein, 5 aa, synthetic construct
GFGAN

SEQ ID NO: 6025 - protein, 5 aa, synthetic construct
LQAWW

SEQ ID NO: 6026 - protein, 5 aa, synthetic construct
TSVNY

SEQ ID NO: 6027 - protein, 5 aa, synthetic construct
TKGHS

SEQ ID NO: 6028 - protein, 5 aa, synthetic construct
GDHLY

SEQ ID NO: 6029 - protein, 5 aa, synthetic construct
VKCDG

SEQ ID NO: 6030 - protein, 5 aa, synthetic construct
MTVLY

SEQ ID NO: 6031 - protein, 5 aa, synthetic construct
ACYDY

SEQ ID NO: 6032 - protein, 5 aa, synthetic construct
GDPDV

SEQ ID NO: 6033 - protein, 5 aa, synthetic construct
GDYVY

SEQ ID NO: 6034 - protein, 5 aa, synthetic construct
HRDRS

SEQ ID NO: 6035 - protein, 5 aa, synthetic construct
CSTVY

SEQ ID NO: 6036 - protein, 5 aa, synthetic construct
VAHGR

SEQ ID NO: 6037 - protein, 5 aa, synthetic construct
KTVTY

SEQ ID NO: 6038 - protein, 5 aa, synthetic construct
DQELY

SEQ ID NO: 6039 - protein, 5 aa, synthetic construct
VRDCW

SEQ ID NO: 6040 - protein, 5 aa, synthetic construct
GTNQG

SEQ ID NO: 6041 - protein, 5 aa, synthetic construct
GTGTF

SEQ ID NO: 6042 - protein, 5 aa, synthetic construct
GRGLI

SEQ ID NO: 6043 - protein, 5 aa, synthetic construct
GFCGT

SEQ ID NO: 6044 - protein, 5 aa, synthetic construct
GENPY

SEQ ID NO: 6045 - protein, 5 aa, synthetic construct
YGDGG

SEQ ID NO: 6046 - protein, 5 aa, synthetic construct
GFRTY

SEQ ID NO: 6047 - protein, 5 aa, synthetic construct
CQAWN

SEQ ID NO: 6048 - protein, 5 aa, synthetic construct
KRADY

SEQ ID NO: 6049 - protein, 5 aa, synthetic construct
TLGER

SEQ ID NO: 6050 - protein, 5 aa, synthetic construct
MRGIE

SEQ ID NO: 6051 - protein, 5 aa, synthetic construct
CRCVR

SEQ ID NO: 6052 - protein, 5 aa, synthetic construct
VMRVY

SEQ ID NO: 6053 - protein, 5 aa, synthetic construct
GLDRG

SEQ ID NO: 6054 - protein, 5 aa, synthetic construct
SNGSY

SEQ ID NO: 6055 - protein, 5 aa, synthetic construct
MWADY

SEQ ID NO: 6056 - protein, 5 aa, synthetic construct
GTLHY

SEQ ID NO: 6057 - protein, 5 aa, synthetic construct
YTAVY

SEQ ID NO: 6058 - protein, 5 aa, synthetic construct
YRQHS

SEQ ID NO: 6059 - protein, 5 aa, synthetic construct
EVSRD

SEQ ID NO: 6060 - protein, 5 aa, synthetic construct
VLTMA

SEQ ID NO: 6061 - protein, 5 aa, synthetic construct
GVGGK

SEQ ID NO: 6062 - protein, 5 aa, synthetic construct
GMGPA

SEQ ID NO: 6063 - protein, 5 aa, synthetic construct
GRDFV

SEQ ID NO: 6064 - protein, 5 aa, synthetic construct
KHTDY

SEQ ID NO: 6065 - protein, 5 aa, synthetic construct
CTSDY

SEQ ID NO: 6066 - protein, 5 aa, synthetic construct
KEVCS

SEQ ID NO: 6067 - protein, 5 aa, synthetic construct
RRGEY

SEQ ID NO: 6068 - protein, 5 aa, synthetic construct
GSIEA

SEQ ID NO: 6069 - protein, 5 aa, synthetic construct
VQARW

SEQ ID NO: 6070 - protein, 5 aa, synthetic construct
DVVRY

SEQ ID NO: 6071 - protein, 5 aa, synthetic construct
RAADY

SEQ ID NO: 6072 - protein, 5 aa, synthetic construct
GVGTK

SEQ ID NO: 6073 - protein, 5 aa, synthetic construct
RFHSA

SEQ ID NO: 6074 - protein, 5 aa, synthetic construct
GLGRD

SEQ ID NO: 6075 - protein, 5 aa, synthetic construct
GYMTY

SEQ ID NO: 6076 - protein, 5 aa, synthetic construct
VVYGA

SEQ ID NO: 6077 - protein, 5 aa, synthetic construct
GNVWY

SEQ ID NO: 6078 - protein, 5 aa, synthetic construct
GTTSY

SEQ ID NO: 6079 - protein, 5 aa, synthetic construct
ASIAW

SEQ ID NO: 6080 - protein, 5 aa, synthetic construct
GSQVY

SEQ ID NO: 6081 - protein, 5 aa, synthetic construct
SRDGQ

SEQ ID NO: 6082 - protein, 5 aa, synthetic construct
MRGVV

SEQ ID NO: 6083 - protein, 5 aa, synthetic construct
GNCGR

SEQ ID NO: 6084 - protein, 5 aa, synthetic construct
GHGHF

SEQ ID NO: 6085 - protein, 5 aa, synthetic construct
GRGLG

SEQ ID NO: 6086 - protein, 5 aa, synthetic construct
GTRRY

SEQ ID NO: 6087 - protein, 5 aa, synthetic construct
DGLGV

SEQ ID NO: 6088 - protein, 5 aa, synthetic construct
VLRGH

SEQ ID NO: 6089 - protein, 5 aa, synthetic construct
GAGVF

SEQ ID NO: 6090 - protein, 5 aa, synthetic construct
NSCTY

SEQ ID NO: 6091 - protein, 5 aa, synthetic construct
YRDDY

SEQ ID NO: 6092 - protein, 5 aa, synthetic construct
DKVQI

SEQ ID NO: 6093 - protein, 5 aa, synthetic construct
SRQVY

SEQ ID NO: 6094 - protein, 5 aa, synthetic construct
GLRHY

SEQ ID NO: 6095 - protein, 5 aa, synthetic construct
VEGQY

SEQ ID NO: 6096 - protein, 5 aa, synthetic construct
VCFGV

SEQ ID NO: 6097 - protein, 5 aa, synthetic construct
GLDAR

SEQ ID NO: 6098 - protein, 5 aa, synthetic construct
VRVKF

SEQ ID NO: 6099 - protein, 5 aa, synthetic construct
FKWIY

SEQ ID NO: 6100 - protein, 5 aa, synthetic construct
GEGVH

SEQ ID NO: 6101 - protein, 4 aa, synthetic construct
WRAV

SEQ ID NO: 6102 - protein, 5 aa, synthetic construct
NRLGY

SEQ ID NO: 6103 - protein, 5 aa, synthetic construct
VQVDY

SEQ ID NO: 6104 - protein, 5 aa, synthetic construct
RVGGY

SEQ ID NO: 6105 - protein, 5 aa, synthetic construct
ARTGY

SEQ ID NO: 6106 - protein, 5 aa, synthetic construct
MRAYE

SEQ ID NO: 6107 - protein, 5 aa, synthetic construct
GQMAY

SEQ ID NO: 6108 - protein, 5 aa, synthetic construct
VVHVY

SEQ ID NO: 6109 - protein, 5 aa, synthetic construct
KDMDY

SEQ ID NO: 6110 - protein, 5 aa, synthetic construct
GHRGY

SEQ ID NO: 6111 - protein, 5 aa, synthetic construct
WRGRL

SEQ ID NO: 6112 - protein, 5 aa, synthetic construct
TQYFY

SEQ ID NO: 6113 - protein, 5 aa, synthetic construct
YWGMY

SEQ ID NO: 6114 - protein, 5 aa, synthetic construct
NRHVY

SEQ ID NO: 6115 - protein, 5 aa, synthetic construct
YSRIY

SEQ ID NO: 6116 - protein, 5 aa, synthetic construct
GVRTY

SEQ ID NO: 6117 - protein, 5 aa, synthetic construct
VRTGV

SEQ ID NO: 6118 - protein, 5 aa, synthetic construct
VRMAF

SEQ ID NO: 6119 - protein, 5 aa, synthetic construct
TPMDN

SEQ ID NO: 6120 - protein, 5 aa, synthetic construct
GVLVY

SEQ ID NO: 6121 - protein, 5 aa, synthetic construct
GDEVY

SEQ ID NO: 6122 - protein, 5 aa, synthetic construct
VGSDR

SEQ ID NO: 6123 - protein, 5 aa, synthetic construct
ARESR

SEQ ID NO: 6124 - protein, 5 aa, synthetic construct
WRTSY

SEQ ID NO: 6125 - protein, 5 aa, synthetic construct
GQTVA

SEQ ID NO: 6126 - protein, 5 aa, synthetic construct
GAGGR

SEQ ID NO: 6127 - protein, 5 aa, synthetic construct
WPWRA

SEQ ID NO: 6128 - protein, 5 aa, synthetic construct
GWGIS

SEQ ID NO: 6129 - protein, 5 aa, synthetic construct
GANVY

SEQ ID NO: 6130 - protein, 5 aa, synthetic construct
WDSIY

SEQ ID NO: 6131 - protein, 5 aa, synthetic construct
GVARY

SEQ ID NO: 6132 - protein, 5 aa, synthetic construct
ARASY

SEQ ID NO: 6133 - protein, 5 aa, synthetic construct
GQCEY

SEQ ID NO: 6134 - protein, 5 aa, synthetic construct
VRRES

SEQ ID NO: 6135 - protein, 5 aa, synthetic construct
VRNRY

SEQ ID NO: 6136 - protein, 5 aa, synthetic construct
GNGRG

SEQ ID NO: 6137 - protein, 5 aa, synthetic construct
NNGRY

SEQ ID NO: 6138 - protein, 5 aa, synthetic construct
GRVAY

SEQ ID NO: 6139 - protein, 5 aa, synthetic construct
WRGVL

SEQ ID NO: 6140 - protein, 5 aa, synthetic construct
GIYMY

SEQ ID NO: 6141 - protein, 5 aa, synthetic construct
GVWLG

SEQ ID NO: 6142 - protein, 5 aa, synthetic construct
GFRVA

SEQ ID NO: 6143 - protein, 5 aa, synthetic construct
SRRSY

SEQ ID NO: 6144 - protein, 5 aa, synthetic construct
GLTRY

SEQ ID NO: 6145 - protein, 5 aa, synthetic construct
GGQPY

SEQ ID NO: 6146 - protein, 5 aa, synthetic construct
FDHLY

SEQ ID NO: 6147 - protein, 5 aa, synthetic construct
GHTIA

SEQ ID NO: 6148 - protein, 5 aa, synthetic construct
VKMSY

SEQ ID NO: 6149 - protein, 5 aa, synthetic construct
GRADM

SEQ ID NO: 6150 - protein, 5 aa, synthetic construct
VRTVE

SEQ ID NO: 6151 - protein, 5 aa, synthetic construct
RNMNY

SEQ ID NO: 6152 - protein, 5 aa, synthetic construct
GEKGI

SEQ ID NO: 6153 - protein, 5 aa, synthetic construct
MREAY

SEQ ID NO: 6154 - protein, 5 aa, synthetic construct
GQATY

SEQ ID NO: 6155 - protein, 5 aa, synthetic construct
GTDRY

SEQ ID NO: 6156 - protein, 5 aa, synthetic construct
MNHMY

SEQ ID NO: 6157 - protein, 5 aa, synthetic construct
GCGFQ

SEQ ID NO: 6158 - protein, 5 aa, synthetic construct
GHTVY

SEQ ID NO: 6159 - protein, 4 aa, synthetic construct
GSAF

SEQ ID NO: 6160 - protein, 5 aa, synthetic construct
VPKHF

SEQ ID NO: 6161 - protein, 5 aa, synthetic construct
GDLRY

SEQ ID NO: 6162 - protein, 5 aa, synthetic construct
VAYSG

SEQ ID NO: 6163 - protein, 5 aa, synthetic construct
ADSAY

SEQ ID NO: 6164 - protein, 5 aa, synthetic construct
GSNFA

SEQ ID NO: 6165 - protein, 5 aa, synthetic construct
GVSLY

SEQ ID NO: 6166 - protein, 5 aa, synthetic construct
VVHGL

SEQ ID NO: 6167 - protein, 5 aa, synthetic construct
VMTNY

SEQ ID NO: 6168 - protein, 5 aa, synthetic construct
GQIMY

SEQ ID NO: 6169 - protein, 5 aa, synthetic construct
CTNHY

SEQ ID NO: 6170 - protein, 4 aa, synthetic construct
VAGF

SEQ ID NO: 6171 - protein, 5 aa, synthetic construct
YSGIY

SEQ ID NO: 6172 - protein, 5 aa, synthetic construct
VQADY

SEQ ID NO: 6173 - protein, 5 aa, synthetic construct
GTTRY

SEQ ID NO: 6174 - protein, 5 aa, synthetic construct
GYGLN

SEQ ID NO: 6175 - protein, 5 aa, synthetic construct
VRGRW

SEQ ID NO: 6176 - protein, 5 aa, synthetic construct
WSGSY

SEQ ID NO: 6177 - protein, 5 aa, synthetic construct
NVVVY

SEQ ID NO: 6178 - protein, 5 aa, synthetic construct
ELRHY

SEQ ID NO: 6179 - protein, 5 aa, synthetic construct
GSKLY

SEQ ID NO: 6180 - protein, 5 aa, synthetic construct
YWGTY

SEQ ID NO: 6181 - protein, 5 aa, synthetic construct
VRHGI

SEQ ID NO: 6182 - protein, 5 aa, synthetic construct
GRDGL

SEQ ID NO: 6183 - protein, 5 aa, synthetic construct
MHRSE

SEQ ID NO: 6184 - protein, 4 aa, synthetic construct
WHSN

SEQ ID NO: 6185 - protein, 5 aa, synthetic construct
SISVY

SEQ ID NO: 6186 - protein, 5 aa, synthetic construct
NHASG

SEQ ID NO: 6187 - protein, 5 aa, synthetic construct
RTCKD

SEQ ID NO: 6188 - protein, 5 aa, synthetic construct
MMQVY

SEQ ID NO: 6189 - protein, 5 aa, synthetic construct
HLRGV

SEQ ID NO: 6190 - protein, 5 aa, synthetic construct
GTRIW

SEQ ID NO: 6191 - protein, 5 aa, synthetic construct
LHQDY

SEQ ID NO: 6192 - protein, 5 aa, synthetic construct
GRGLS

SEQ ID NO: 6193 - protein, 5 aa, synthetic construct
GEDTR

SEQ ID NO: 6194 - protein, 5 aa, synthetic construct
LRAVY

SEQ ID NO: 6195 - protein, 5 aa, synthetic construct
RAGHY

SEQ ID NO: 6196 - protein, 5 aa, synthetic construct
GAVNF

SEQ ID NO: 6197 - protein, 5 aa, synthetic construct
GNLMY

SEQ ID NO: 6198 - protein, 5 aa, synthetic construct
DGKEH

SEQ ID NO: 6199 - protein, 5 aa, synthetic construct
GATRC

SEQ ID NO: 6200 - protein, 5 aa, synthetic construct
GSASY

SEQ ID NO: 6201 - protein, 5 aa, synthetic construct
GGGFY

SEQ ID NO: 6202 - protein, 5 aa, synthetic construct
VGRGH

SEQ ID NO: 6203 - protein, 5 aa, synthetic construct
GTGNN

SEQ ID NO: 6204 - protein, 5 aa, synthetic construct
YTRGY

SEQ ID NO: 6205 - protein, 5 aa, synthetic construct
MRKAD

SEQ ID NO: 6206 - protein, 5 aa, synthetic construct
VRLYD

SEQ ID NO: 6207 - protein, 5 aa, synthetic construct
NKGAY

SEQ ID NO: 6208 - protein, 5 aa, synthetic construct
GRFEY

SEQ ID NO: 6209 - protein, 4 aa, synthetic construct
DGDY

SEQ ID NO: 6210 - protein, 5 aa, synthetic construct
RRDDY

SEQ ID NO: 6211 - protein, 5 aa, synthetic construct
GVNLL

SEQ ID NO: 6212 - protein, 5 aa, synthetic construct
GMAVY

SEQ ID NO: 6213 - protein, 5 aa, synthetic construct
VRCGD

SEQ ID NO: 6214 - protein, 5 aa, synthetic construct
VREDT

SEQ ID NO: 6215 - protein, 5 aa, synthetic construct
HMRYF

SEQ ID NO: 6216 - protein, 5 aa, synthetic construct
GRVDY

SEQ ID NO: 6217 - protein, 4 aa, synthetic construct
WNGL

SEQ ID NO: 6218 - protein, 5 aa, synthetic construct
SNGEY

SEQ ID NO: 6219 - protein, 5 aa, synthetic construct
VTNIY

SEQ ID NO: 6220 - protein, 5 aa, synthetic construct
CLSTY

SEQ ID NO: 6221 - protein, 5 aa, synthetic construct
VRWGS

SEQ ID NO: 6222 - protein, 5 aa, synthetic construct
AVHAY

SEQ ID NO: 6223 - protein, 5 aa, synthetic construct
GKDVG

SEQ ID NO: 6224 - protein, 5 aa, synthetic construct
GKRHY

SEQ ID NO: 6225 - protein, 5 aa, synthetic construct
VRTAW

SEQ ID NO: 6226 - protein, 5 aa, synthetic construct
GNDNG

SEQ ID NO: 6227 - protein, 5 aa, synthetic construct
GRYLR

SEQ ID NO: 6228 - protein, 5 aa, synthetic construct
ADTAY

SEQ ID NO: 6229 - protein, 5 aa, synthetic construct
ASVGR

SEQ ID NO: 6230 - protein, 5 aa, synthetic construct
VGRDY

SEQ ID NO: 6231 - protein, 5 aa, synthetic construct
VHDDY

SEQ ID NO: 6232 - protein, 5 aa, synthetic construct
GEGGY

SEQ ID NO: 6233 - protein, 5 aa, synthetic construct
MKDDY

SEQ ID NO: 6234 - protein, 5 aa, synthetic construct
NVGPY

SEQ ID NO: 6235 - protein, 5 aa, synthetic construct
RDGCY

SEQ ID NO: 6236 - protein, 5 aa, synthetic construct
FDGMY

SEQ ID NO: 6237 - protein, 5 aa, synthetic construct
GKVSY

SEQ ID NO: 6238 - protein, 5 aa, synthetic construct
ATRGD

SEQ ID NO: 6239 - protein, 5 aa, synthetic construct
GFLER

SEQ ID NO: 6240 - protein, 5 aa, synthetic construct
MHCVY

SEQ ID NO: 6241 - protein, 5 aa, synthetic construct
GLSSY

SEQ ID NO: 6242 - protein, 5 aa, synthetic construct
CNCGY

SEQ ID NO: 6243 - protein, 5 aa, synthetic construct
VADGY

SEQ ID NO: 6244 - protein, 5 aa, synthetic construct
GTVMY

SEQ ID NO: 6245 - protein, 5 aa, synthetic construct
MGEEY

SEQ ID NO: 6246 - protein, 5 aa, synthetic construct
DVQDY

SEQ ID NO: 6247 - protein, 5 aa, synthetic construct
GFGSH

SEQ ID NO: 6248 - protein, 5 aa, synthetic construct
VSFGN

SEQ ID NO: 6249 - protein, 5 aa, synthetic construct
RVRGY

SEQ ID NO: 6250 - protein, 5 aa, synthetic construct
DSMAY

SEQ ID NO: 6251 - protein, 5 aa, synthetic construct
MWTDY

SEQ ID NO: 6252 - protein, 5 aa, synthetic construct
NNDAY

SEQ ID NO: 6253 - protein, 5 aa, synthetic construct
QYGVY

SEQ ID NO: 6254 - protein, 5 aa, synthetic construct
NNGGY

SEQ ID NO: 6255 - protein, 5 aa, synthetic construct
VRASS

SEQ ID NO: 6256 - protein, 5 aa, synthetic construct
WQGYY

SEQ ID NO: 6257 - protein, 5 aa, synthetic construct
GSVVY

SEQ ID NO: 6258 - protein, 5 aa, synthetic construct
GDLVY

SEQ ID NO: 6259 - protein, 5 aa, synthetic construct
MMTRY

SEQ ID NO: 6260 - protein, 5 aa, synthetic construct
GMGLM

SEQ ID NO: 6261 - protein, 5 aa, synthetic construct
GSLSK

SEQ ID NO: 6262 - protein, 5 aa, synthetic construct
GSGDY

SEQ ID NO: 6263 - protein, 5 aa, synthetic construct
VVGDY

SEQ ID NO: 6264 - protein, 5 aa, synthetic construct
TRHDY

SEQ ID NO: 6265 - protein, 5 aa, synthetic construct
IVGSY

SEQ ID NO: 6266 - protein, 5 aa, synthetic construct
SRTAE

SEQ ID NO: 6267 - protein, 5 aa, synthetic construct
GHGVY

SEQ ID NO: 6268 - protein, 5 aa, synthetic construct
FRGVV

SEQ ID NO: 6269 - protein, 5 aa, synthetic construct
VPGSR

SEQ ID NO: 6270 - protein, 5 aa, synthetic construct
IMRRI

SEQ ID NO: 6271 - protein, 5 aa, synthetic construct
YGDAE

SEQ ID NO: 6272 - protein, 5 aa, synthetic construct
AMTTY

SEQ ID NO: 6273 - protein, 5 aa, synthetic construct
GGGFG

SEQ ID NO: 6274 - protein, 5 aa, synthetic construct
MTGAM

SEQ ID NO: 6275 - protein, 5 aa, synthetic construct
ANMLY

SEQ ID NO: 6276 - protein, 5 aa, synthetic construct
WKLWY

SEQ ID NO: 6277 - protein, 5 aa, synthetic construct
ANYDY

SEQ ID NO: 6278 - protein, 5 aa, synthetic construct
GKELY

SEQ ID NO: 6279 - protein, 5 aa, synthetic construct
SDVTE

SEQ ID NO: 6280 - protein, 5 aa, synthetic construct
GDMHY

SEQ ID NO: 6281 - protein, 5 aa, synthetic construct
GVAFY

SEQ ID NO: 6282 - protein, 5 aa, synthetic construct
VQRDY

SEQ ID NO: 6283 - protein, 5 aa, synthetic construct
VVSSY

SEQ ID NO: 6284 - protein, 5 aa, synthetic construct
TNSEY

SEQ ID NO: 6285 - protein, 5 aa, synthetic construct
GMNRY

SEQ ID NO: 6286 - protein, 5 aa, synthetic construct
GAIGV

SEQ ID NO: 6287 - protein, 5 aa, synthetic construct
GTAVY

SEQ ID NO: 6288 - protein, 5 aa, synthetic construct
GSVPY

SEQ ID NO: 6289 - protein, 5 aa, synthetic construct
DHVRH

SEQ ID NO: 6290 - protein, 5 aa, synthetic construct
GQHVY

SEQ ID NO: 6291 - protein, 5 aa, synthetic construct
GGRTY

SEQ ID NO: 6292 - protein, 5 aa, synthetic construct
GVGLM

SEQ ID NO: 6293 - protein, 5 aa, synthetic construct
GSCNA

SEQ ID NO: 6294 - protein, 5 aa, synthetic construct
GFKQC

SEQ ID NO: 6295 - protein, 5 aa, synthetic construct
GMRVF

SEQ ID NO: 6296 - protein, 5 aa, synthetic construct
WDGDY

SEQ ID NO: 6297 - protein, 5 aa, synthetic construct
GKHSG

SEQ ID NO: 6298 - protein, 5 aa, synthetic construct
MRGSI

SEQ ID NO: 6299 - protein, 5 aa, synthetic construct
GRQTY

SEQ ID NO: 6300 - protein, 5 aa, synthetic construct
AAGYA

SEQ ID NO: 6301 - protein, 5 aa, synthetic construct
MLRAY

SEQ ID NO: 6302 - protein, 5 aa, synthetic construct
GRANY

SEQ ID NO: 6303 - protein, 5 aa, synthetic construct
GRDTS

SEQ ID NO: 6304 - protein, 5 aa, synthetic construct
TDGVY

SEQ ID NO: 6305 - protein, 5 aa, synthetic construct
SRVNT

SEQ ID NO: 6306 - protein, 5 aa, synthetic construct
GTNVY

SEQ ID NO: 6307 - protein, 5 aa, synthetic construct
NRQSY

SEQ ID NO: 6308 - protein, 5 aa, synthetic construct
GRGGF

SEQ ID NO: 6309 - protein, 5 aa, synthetic construct
VRQEY

SEQ ID NO: 6310 - protein, 5 aa, synthetic construct
VWRNY

SEQ ID NO: 6311 - protein, 5 aa, synthetic construct
NGLRI

SEQ ID NO: 6312 - protein, 5 aa, synthetic construct
NVNVY

SEQ ID NO: 6313 - protein, 5 aa, synthetic construct
CRAVY

SEQ ID NO: 6314 - protein, 5 aa, synthetic construct
GSMWI

SEQ ID NO: 6315 - protein, 5 aa, synthetic construct
SERMV

SEQ ID NO: 6316 - protein, 5 aa, synthetic construct
MNVHY

SEQ ID NO: 6317 - protein, 5 aa, synthetic construct
MTRAY

SEQ ID NO: 6318 - protein, 5 aa, synthetic construct
RLDTY

SEQ ID NO: 6319 - protein, 5 aa, synthetic construct
GVNGD

SEQ ID NO: 6320 - protein, 5 aa, synthetic construct
NTHAG

SEQ ID NO: 6321 - protein, 5 aa, synthetic construct
TSTLY

SEQ ID NO: 6322 - protein, 5 aa, synthetic construct
GMRCY

SEQ ID NO: 6323 - protein, 5 aa, synthetic construct
AKDAF

SEQ ID NO: 6324 - protein, 5 aa, synthetic construct
GVTTY

SEQ ID NO: 6325 - protein, 5 aa, synthetic construct
INHGC

SEQ ID NO: 6326 - protein, 5 aa, synthetic construct
GSVEY

SEQ ID NO: 6327 - protein, 5 aa, synthetic construct
MRSDY

SEQ ID NO: 6328 - protein, 5 aa, synthetic construct
GAAHL

SEQ ID NO: 6329 - protein, 5 aa, synthetic construct
GQSDW

SEQ ID NO: 6330 - protein, 5 aa, synthetic construct
AIGAS

SEQ ID NO: 6331 - protein, 5 aa, synthetic construct
MRVLY

SEQ ID NO: 6332 - protein, 5 aa, synthetic construct
DRIMA

SEQ ID NO: 6333 - protein, 5 aa, synthetic construct
CKVRY

SEQ ID NO: 6334 - protein, 5 aa, synthetic construct
GTTMH

SEQ ID NO: 6335 - protein, 5 aa, synthetic construct
WGARY

SEQ ID NO: 6336 - protein, 5 aa, synthetic construct
GGSQS

SEQ ID NO: 6337 - protein, 5 aa, synthetic construct
TDSMY

SEQ ID NO: 6338 - protein, 5 aa, synthetic construct
CRWGM

SEQ ID NO: 6339 - protein, 5 aa, synthetic construct
GTRAY

SEQ ID NO: 6340 - protein, 5 aa, synthetic construct
NVMTY

SEQ ID NO: 6341 - protein, 5 aa, synthetic construct
GRTTY

SEQ ID NO: 6342 - protein, 5 aa, synthetic construct
GLGHD

SEQ ID NO: 6343 - protein, 5 aa, synthetic construct
AVTIY

SEQ ID NO: 6344 - protein, 5 aa, synthetic construct
TRDKY

SEQ ID NO: 6345 - protein, 5 aa, synthetic construct
LRSYY

SEQ ID NO: 6346 - protein, 5 aa, synthetic construct
RGSAY

SEQ ID NO: 6347 - protein, 5 aa, synthetic construct
MRGHY

SEQ ID NO: 6348 - protein, 5 aa, synthetic construct
SKNAY

SEQ ID NO: 6349 - protein, 5 aa, synthetic construct
GRNLL

SEQ ID NO: 6350 - protein, 5 aa, synthetic construct
GNNGN

SEQ ID NO: 6351 - protein, 5 aa, synthetic construct
DRTEY

SEQ ID NO: 6352 - protein, 5 aa, synthetic construct
IIGVV

SEQ ID NO: 6353 - protein, 5 aa, synthetic construct
GFGLY

SEQ ID NO: 6354 - protein, 5 aa, synthetic construct
GNVHY

SEQ ID NO: 6355 - protein, 5 aa, synthetic construct
WPFVD

SEQ ID NO: 6356 - protein, 4 aa, synthetic construct
GING

SEQ ID NO: 6357 - protein, 5 aa, synthetic construct
SVVMY

SEQ ID NO: 6358 - protein, 5 aa, synthetic construct
YSSSY

SEQ ID NO: 6359 - protein, 5 aa, synthetic construct
IRGDY

SEQ ID NO: 6360 - protein, 5 aa, synthetic construct
KHRSY

SEQ ID NO: 6361 - protein, 5 aa, synthetic construct
VREMA

SEQ ID NO: 6362 - protein, 5 aa, synthetic construct
VAGSF

SEQ ID NO: 6363 - protein, 5 aa, synthetic construct
GNVSY

SEQ ID NO: 6364 - protein, 5 aa, synthetic construct
MLHSY

SEQ ID NO: 6365 - protein, 5 aa, synthetic construct
VFRGN

SEQ ID NO: 6366 - protein, 5 aa, synthetic construct
GVDAG

SEQ ID NO: 6367 - protein, 5 aa, synthetic construct
YGTGG

SEQ ID NO: 6368 - protein, 5 aa, synthetic construct
GSDVY

SEQ ID NO: 6369 - protein, 5 aa, synthetic construct
WRAVY

SEQ ID NO: 6370 - protein, 5 aa, synthetic construct
VPRGG

SEQ ID NO: 6371 - protein, 5 aa, synthetic construct
WTGSY

SEQ ID NO: 6372 - protein, 5 aa, synthetic construct
GMALY

SEQ ID NO: 6373 - protein, 5 aa, synthetic construct
VRFSS

SEQ ID NO: 6374 - protein, 5 aa, synthetic construct
HGMGT

SEQ ID NO: 6375 - protein, 5 aa, synthetic construct
GRYIY

SEQ ID NO: 6376 - protein, 5 aa, synthetic construct
RGDDT

SEQ ID NO: 6377 - protein, 5 aa, synthetic construct
LDGQF

SEQ ID NO: 6378 - protein, 5 aa, synthetic construct
GRGYW

SEQ ID NO: 6379 - protein, 5 aa, synthetic construct
AISIL

SEQ ID NO: 6380 - protein, 6 aa, synthetic construct
LVANTG

SEQ ID NO: 6381 - protein, 9 aa, synthetic construct
TCWLHGGMT

SEQ ID NO: 6382 - protein, 14 aa, synthetic construct
YYFVMDWNTQCDLV

SEQ ID NO: 6383 - protein, 6 aa, synthetic construct
LTIRIH

SEQ ID NO: 6384 - protein, 9 aa, synthetic construct
FVWDDVGLV

SEQ ID NO: 6385 - protein, 9 aa, synthetic construct
DIIEHHHLA

SEQ ID NO: 6386 - protein, 11 aa, synthetic construct
LVADNVHLAIS

SEQ ID NO: 6387 - protein, 9 aa, synthetic construct
RVRVIDGVL

SEQ ID NO: 6388 - protein, 9 aa, synthetic construct
IVFTDEGLR

SEQ ID NO: 6389 - protein, 13 aa, synthetic construct
LFSIDTALDLGMQ

SEQ ID NO: 6390 - protein, 7 aa, synthetic construct
FLHGSGD

SEQ ID NO: 6391 - protein, 10 aa, synthetic construct
IIEEDYFHVA

SEQ ID NO: 6392 - protein, 10 aa, synthetic construct
LLPVIGVNGT

SEQ ID NO: 6393 - protein, 9 aa, synthetic construct
WVLGSIYVE

SEQ ID NO: 6394 - protein, 10 aa, synthetic construct
EEWISEFRAR

SEQ ID NO: 6395 - protein, 13 aa, synthetic construct
SIWDTSDLRIGVR

SEQ ID NO: 6396 - protein, 10 aa, synthetic construct
AVDRNVSGID

SEQ ID NO: 6397 - protein, 9 aa, synthetic construct
LWGVGPFPI

SEQ ID NO: 6398 - protein, 9 aa, synthetic construct
NSVSSDVRR

SEQ ID NO: 6399 - protein, 6 aa, synthetic construct
ESDVLD

SEQ ID NO: 6400 - protein, 9 aa, synthetic construct
TDQSSESRQ

SEQ ID NO: 6401 - protein, 7 aa, synthetic construct
IIRPDSD

SEQ ID NO: 6402 - protein, 10 aa, synthetic construct
LGLMARGSEF

SEQ ID NO: 6403 - protein, 7 aa, synthetic construct
VSIELVA

SEQ ID NO: 6404 - protein, 9 aa, synthetic construct
SIIQDRLFV

SEQ ID NO: 6405 - protein, 9 aa, synthetic construct
TVFCKTGFK

SEQ ID NO: 6406 - protein, 9 aa, synthetic construct
LVLEAFANQ

SEQ ID NO: 6407 - protein, 10 aa, synthetic construct
GMHIKAVFIL

SEQ ID NO: 6408 - protein, 7 aa, synthetic construct
LMVTPIM

SEQ ID NO: 6409 - protein, 8 aa, synthetic construct
SAMRVMKM

SEQ ID NO: 6410 - protein, 6 aa, synthetic construct
VNECFD

SEQ ID NO: 6411 - protein, 8 aa, synthetic construct
TYLELVFA

SEQ ID NO: 6412 - protein, 8 aa, synthetic construct
TEFKERFF

SEQ ID NO: 6413 - protein, 11 aa, synthetic construct
SAIVVLIGRLR

SEQ ID NO: 6414 - protein, 9 aa, synthetic construct
VVIVLGGKL

SEQ ID NO: 6415 - protein, 9 aa, synthetic construct
VNIGIGGFR

SEQ ID NO: 6416 - protein, 11 aa, synthetic construct
VAVRKIPIVIN

SEQ ID NO: 6417 - protein, 9 aa, synthetic construct
TGVVLGYFV

SEQ ID NO: 6418 - protein, 11 aa, synthetic construct
TFWPVLVCRCV

SEQ ID NO: 6419 - protein, 9 aa, synthetic construct
WRIEKQLFD

SEQ ID NO: 6420 - protein, 8 aa, synthetic construct
TSFGGRCH

SEQ ID NO: 6421 - protein, 11 aa, synthetic construct
VYQDWAEGRFL

SEQ ID NO: 6422 - protein, 6 aa, synthetic construct
PHYWML

SEQ ID NO: 6423 - protein, 10 aa, synthetic construct
CSLIISSGFA

SEQ ID NO: 6424 - protein, 9 aa, synthetic construct
TRLDTAGVQ

SEQ ID NO: 6425 - protein, 12 aa, synthetic construct
TGMCLVPVLFFV

SEQ ID NO: 6426 - protein, 10 aa, synthetic construct
TGVSGNNGFH

SEQ ID NO: 6427 - protein, 6 aa, synthetic construct
VVWPIH

SEQ ID NO: 6428 - protein, 10 aa, synthetic construct
TSFQSRVGFV

SEQ ID NO: 6429 - protein, 7 aa, synthetic construct
LLSPSLK

SEQ ID NO: 6430 - protein, 10 aa, synthetic construct
TVVNEKRRFW

SEQ ID NO: 6431 - protein, 10 aa, synthetic construct
LGRIDGLNNP

SEQ ID NO: 6432 - protein, 8 aa, synthetic construct
VVYAVRFH

SEQ ID NO: 6433 - protein, 11 aa, synthetic construct
WMLVVQRHRLQ

SEQ ID NO: 6434 - protein, 10 aa, synthetic construct
TIRTAYSMFG

SEQ ID NO: 6435 - protein, 9 aa, synthetic construct
TSMMHMRFF

SEQ ID NO: 6436 - protein, 8 aa, synthetic construct
TVFMNGFV

SEQ ID NO: 6437 - protein, 9 aa, synthetic construct
TVWQHIHMM

SEQ ID NO: 6438 - protein, 9 aa, synthetic construct
SSLATDGVR

SEQ ID NO: 6439 - protein, 9 aa, synthetic construct
VSYGEFGIV

SEQ ID NO: 6440 - protein, 10 aa, synthetic construct
TCVRDLGLFV

SEQ ID NO: 6441 - protein, 9 aa, synthetic construct
VVHNGGWFI

SEQ ID NO: 6442 - protein, 8 aa, synthetic construct
TAIGVTFT

SEQ ID NO: 6443 - protein, 10 aa, synthetic construct
VTWSVLTLFG

SEQ ID NO: 6444 - protein, 9 aa, synthetic construct
VAMSVRGFR

SEQ ID NO: 6445 - protein, 6 aa, synthetic construct
LCKMVE

SEQ ID NO: 6446 - protein, 9 aa, synthetic construct
MVIGLVSWA

SEQ ID NO: 6447 - protein, 9 aa, synthetic construct
TAYCTLNFV

SEQ ID NO: 6448 - protein, 8 aa, synthetic construct
TVLVYTFI

SEQ ID NO: 6449 - protein, 8 aa, synthetic construct
IRETMQVI

SEQ ID NO: 6450 - protein, 9 aa, synthetic construct
WYLWDIGFV

SEQ ID NO: 6451 - protein, 9 aa, synthetic construct
TAMPNISFV

SEQ ID NO: 6452 - protein, 8 aa, synthetic construct
TVIYNGFV

SEQ ID NO: 6453 - protein, 10 aa, synthetic construct
KGDGEGTLVW

SEQ ID NO: 6454 - protein, 9 aa, synthetic construct
TVFRVNFKV

SEQ ID NO: 6455 - protein, 9 aa, synthetic construct
TVINKSVIA

SEQ ID NO: 6456 - protein, 9 aa, synthetic construct
TTVMARGFR

SEQ ID NO: 6457 - protein, 7 aa, synthetic construct
TMLMEFV

SEQ ID NO: 6458 - protein, 9 aa, synthetic construct
TLLHKASVL

SEQ ID NO: 6459 - protein, 11 aa, synthetic construct
TALTLYDYTFR

SEQ ID NO: 6460 - protein, 9 aa, synthetic construct
TIFDTICFS

SEQ ID NO: 6461 - protein, 9 aa, synthetic construct
MYVVGTSFV

SEQ ID NO: 6462 - protein, 9 aa, synthetic construct
VSVTFRTFR

SEQ ID NO: 6463 - protein, 8 aa, synthetic construct
LIFDVEFL

SEQ ID NO: 6464 - protein, 8 aa, synthetic construct
TVFINGFR

SEQ ID NO: 6465 - protein, 9 aa, synthetic construct
TTFDQGAFF

SEQ ID NO: 6466 - protein, 9 aa, synthetic construct
ALITPVGFV

SEQ ID NO: 6467 - protein, 13 aa, synthetic construct
LSVREDVIGFVVF

SEQ ID NO: 6468 - protein, 10 aa, synthetic construct
VVCVECCVFR

SEQ ID NO: 6469 - protein, 10 aa, synthetic construct
TAHGCIMHIR

SEQ ID NO: 6470 - protein, 13 aa, synthetic construct
TACLRRMVGMTFV

SEQ ID NO: 6471 - protein, 9 aa, synthetic construct
TVVRPRVIC

SEQ ID NO: 6472 - protein, 11 aa, synthetic construct
VYLVVRNHEIE

SEQ ID NO: 6473 - protein, 7 aa, synthetic construct
LRAIWGV

SEQ ID NO: 6474 - protein, 9 aa, synthetic construct
TRLGEMGFR

SEQ ID NO: 6475 - protein, 10 aa, synthetic construct
VEFAVGLPRK

SEQ ID NO: 6476 - protein, 8 aa, synthetic construct
TNFLSTFR

SEQ ID NO: 6477 - protein, 8 aa, synthetic construct
LVHHMGFQ

SEQ ID NO: 6478 - protein, 12 aa, synthetic construct
TCFGCETKFRFG

SEQ ID NO: 6479 - protein, 11 aa, synthetic construct
VRGGFQTDERV

SEQ ID NO: 6480 - protein, 10 aa, synthetic construct
TAVKVGGALV

SEQ ID NO: 6481 - protein, 12 aa, synthetic construct
TTVEVRDIVRFS

SEQ ID NO: 6482 - protein, 6 aa, synthetic construct
VNLELV

SEQ ID NO: 6483 - protein, 13 aa, synthetic construct
SSLSETHMHVKII

SEQ ID NO: 6484 - protein, 13 aa, synthetic construct
TTFRPVCSVMSIL

SEQ ID NO: 6485 - protein, 9 aa, synthetic construct
TRFIVKNFV

SEQ ID NO: 6486 - protein, 13 aa, synthetic construct
ADELDMNSVPADT

SEQ ID NO: 6487 - protein, 8 aa, synthetic construct
IKAGSMVM

SEQ ID NO: 6488 - protein, 9 aa, synthetic construct
TSFGGTHFV

SEQ ID NO: 6489 - protein, 9 aa, synthetic construct
TASRALGFQ

SEQ ID NO: 6490 - protein, 10 aa, synthetic construct
TTLSSHLMFV

SEQ ID NO: 6491 - protein, 8 aa, synthetic construct
TAVCKRVQ

SEQ ID NO: 6492 - protein, 9 aa, synthetic construct
TVIETVMFR

SEQ ID NO: 6493 - protein, 9 aa, synthetic construct
VLASGGTIR

SEQ ID NO: 6494 - protein, 13 aa, synthetic construct
LGLQGNGGMARFA

SEQ ID NO: 6495 - protein, 8 aa, synthetic construct
TVMIRSFV

SEQ ID NO: 6496 - protein, 9 aa, synthetic construct
TLFQVGKFI

SEQ ID NO: 6497 - protein, 6 aa, synthetic construct
IGWFSG

SEQ ID NO: 6498 - protein, 9 aa, synthetic construct
TMWIANRFV

SEQ ID NO: 6499 - protein, 9 aa, synthetic construct
TSLNGLAVL

SEQ ID NO: 6500 - protein, 10 aa, synthetic construct
TTYHRAQGFL

SEQ ID NO: 6501 - protein, 9 aa, synthetic construct
LVVNSGGFL

SEQ ID NO: 6502 - protein, 8 aa, synthetic construct
TVYTSVFY

SEQ ID NO: 6503 - protein, 9 aa, synthetic construct
VFVLRFGVV

SEQ ID NO: 6504 - protein, 8 aa, synthetic construct
TCWVGQFV

SEQ ID NO: 6505 - protein, 10 aa, synthetic construct
DPFVLISGKR

SEQ ID NO: 6506 - protein, 10 aa, synthetic construct
GVYIVRLGFA

SEQ ID NO: 6507 - protein, 10 aa, synthetic construct
TVLAATVVFA

SEQ ID NO: 6508 - protein, 9 aa, synthetic construct
VRFSGFMFE

SEQ ID NO: 6509 - protein, 6 aa, synthetic construct
TQISFK

SEQ ID NO: 6510 - protein, 8 aa, synthetic construct
TRLETRFM

SEQ ID NO: 6511 - protein, 11 aa, synthetic construct
TVLRLADWKFM

SEQ ID NO: 6512 - protein, 9 aa, synthetic construct
TVVRRGLFS

SEQ ID NO: 6513 - protein, 10 aa, synthetic construct
TMLEAGGRPS

SEQ ID NO: 6514 - protein, 10 aa, synthetic construct
NADVSVVTCG

SEQ ID NO: 6515 - protein, 10 aa, synthetic construct
TMYLKFGAFR

SEQ ID NO: 6516 - protein, 8 aa, synthetic construct
TIWRGQFM

SEQ ID NO: 6517 - protein, 6 aa, synthetic construct
TMSSFK

SEQ ID NO: 6518 - protein, 12 aa, synthetic construct
VVHDVGYLDDIP

SEQ ID NO: 6519 - protein, 9 aa, synthetic construct
TARLRLVFR

SEQ ID NO: 6520 - protein, 12 aa, synthetic construct
TNIKECSGVRFN

SEQ ID NO: 6521 - protein, 8 aa, synthetic construct
TCWDGHFA

SEQ ID NO: 6522 - protein, 9 aa, synthetic construct
TLVARLAFV

SEQ ID NO: 6523 - protein, 10 aa, synthetic construct
TAVTGLSWFQ

SEQ ID NO: 6524 - protein, 10 aa, synthetic construct
ISLAVRAGFV

SEQ ID NO: 6525 - protein, 13 aa, synthetic construct
TCIHWVMASVRIG

SEQ ID NO: 6526 - protein, 10 aa, synthetic construct
STWSDGGGFG

SEQ ID NO: 6527 - protein, 9 aa, synthetic construct
SVRTSHGFS

SEQ ID NO: 6528 - protein, 9 aa, synthetic construct
TSLVQAGVK

SEQ ID NO: 6529 - protein, 9 aa, synthetic construct
TVVVRVSVR

SEQ ID NO: 6530 - protein, 10 aa, synthetic construct
TVFLPHIGFG

SEQ ID NO: 6531 - protein, 9 aa, synthetic construct
TAWIVESFT

SEQ ID NO: 6532 - protein, 8 aa, synthetic construct
TIVFNGLV

SEQ ID NO: 6533 - protein, 14 aa, synthetic construct
FCVVKDSNRMATFI

SEQ ID NO: 6534 - protein, 10 aa, synthetic construct
TCFMRGRGFV

SEQ ID NO: 6535 - protein, 9 aa, synthetic construct
TVFDRYGSG

SEQ ID NO: 6536 - protein, 13 aa, synthetic construct
TAVNIRLGRVKIN

SEQ ID NO: 6537 - protein, 9 aa, synthetic construct
WVVRENGFS

SEQ ID NO: 6538 - protein, 11 aa, synthetic construct
TMFVVRRGEFV

SEQ ID NO: 6539 - protein, 10 aa, synthetic construct
TVVISNGRLV

SEQ ID NO: 6540 - protein, 9 aa, synthetic construct
PLMDNDNTA

SEQ ID NO: 6541 - protein, 12 aa, synthetic construct
TVLLLLRAIAFG

SEQ ID NO: 6542 - protein, 9 aa, synthetic construct
TAIGRIRFI

SEQ ID NO: 6543 - protein, 9 aa, synthetic construct
TWATQRGFI

SEQ ID NO: 6544 - protein, 9 aa, synthetic construct
SQLIMTGFC

SEQ ID NO: 6545 - protein, 9 aa, synthetic construct
TVCSTRRFV

SEQ ID NO: 6546 - protein, 8 aa, synthetic construct
TGFLAMFL

SEQ ID NO: 6547 - protein, 10 aa, synthetic construct
VAFRMVDAFQ

SEQ ID NO: 6548 - protein, 8 aa, synthetic construct
TRMTVRRV

SEQ ID NO: 6549 - protein, 9 aa, synthetic construct
MMFSGTRFL

SEQ ID NO: 6550 - protein, 9 aa, synthetic construct
VLVQMCVFH

SEQ ID NO: 6551 - protein, 9 aa, synthetic construct
TTFRDHALS

SEQ ID NO: 6552 - protein, 9 aa, synthetic construct
TIFSGRVLM

SEQ ID NO: 6553 - protein, 9 aa, synthetic construct
TAIDNARIV

SEQ ID NO: 6554 - protein, 9 aa, synthetic construct
TSVSRDGFK

SEQ ID NO: 6555 - protein, 9 aa, synthetic construct
TTFTGAGFR

SEQ ID NO: 6556 - protein, 14 aa, synthetic construct
SSLHLADLGKIEKA

SEQ ID NO: 6557 - protein, 9 aa, synthetic construct
TFLAVMTID

SEQ ID NO: 6558 - protein, 8 aa, synthetic construct
DGWRMVKR

SEQ ID NO: 6559 - protein, 9 aa, synthetic construct
TVVGRLGFY

SEQ ID NO: 6560 - protein, 9 aa, synthetic construct
TLLNIQRFV

SEQ ID NO: 6561 - protein, 6 aa, synthetic construct
TLKAFE

SEQ ID NO: 6562 - protein, 10 aa, synthetic construct
SAILNGGGIV

SEQ ID NO: 6563 - protein, 9 aa, synthetic construct
TGLFRRKFL

SEQ ID NO: 6564 - protein, 11 aa, synthetic construct
TGWDSTVGRFA

SEQ ID NO: 6565 - protein, 11 aa, synthetic construct
TAIDRLMIKFT

SEQ ID NO: 6566 - protein, 9 aa, synthetic construct
TMALTARFK

SEQ ID NO: 6567 - protein, 9 aa, synthetic construct
VIVGRDRFQ

SEQ ID NO: 6568 - protein, 13 aa, synthetic construct
KGIIPDVRTMAWV

SEQ ID NO: 6569 - protein, 9 aa, synthetic construct
VIFTVGAFR

SEQ ID NO: 6570 - protein, 10 aa, synthetic construct
VLCDALGSFW

SEQ ID NO: 6571 - protein, 12 aa, synthetic construct
TALIRKPYMRFM

SEQ ID NO: 6572 - protein, 9 aa, synthetic construct
TSFSNACFV

SEQ ID NO: 6573 - protein, 9 aa, synthetic construct
TYVADGLFG

SEQ ID NO: 6574 - protein, 11 aa, synthetic construct
VQMIRWDGGWQ

SEQ ID NO: 6575 - protein, 9 aa, synthetic construct
TAVVNMMIV

SEQ ID NO: 6576 - protein, 14 aa, synthetic construct
TYIGRDVSMCVKFW

SEQ ID NO: 6577 - protein, 8 aa, synthetic construct
LVFREDFL

SEQ ID NO: 6578 - protein, 9 aa, synthetic construct
TELRTLKVQ

SEQ ID NO: 6579 - protein, 9 aa, synthetic construct
TTLLNMRFV

SEQ ID NO: 6580 - protein, 8 aa, synthetic construct
TMLRSLFT

SEQ ID NO: 6581 - protein, 12 aa, synthetic construct
TAVLTGDRSGIS

SEQ ID NO: 6582 - protein, 10 aa, synthetic construct
TVCFPGSCFN

SEQ ID NO: 6583 - protein, 8 aa, synthetic construct
TVFDASFY

SEQ ID NO: 6584 - protein, 8 aa, synthetic construct
VSFDRNFE

SEQ ID NO: 6585 - protein, 9 aa, synthetic construct
TSMGGHRFV

SEQ ID NO: 6586 - protein, 8 aa, synthetic construct
VTFAYAFY

SEQ ID NO: 6587 - protein, 9 aa, synthetic construct
CMGCAWTTD

SEQ ID NO: 6588 - protein, 8 aa, synthetic construct
GVFARHKQ

SEQ ID NO: 6589 - protein, 9 aa, synthetic construct
TCINDGGFV

SEQ ID NO: 6590 - protein, 8 aa, synthetic construct
VNLRLRVT

SEQ ID NO: 6591 - protein, 9 aa, synthetic construct
LVVTRHSFT

SEQ ID NO: 6592 - protein, 8 aa, synthetic construct
VIVADGFV

SEQ ID NO: 6593 - protein, 14 aa, synthetic construct
MSESRDPSVLECVG

SEQ ID NO: 6594 - protein, 8 aa, synthetic construct
VMWGIALS

SEQ ID NO: 6595 - protein, 9 aa, synthetic construct
TMFHNSHFL

SEQ ID NO: 6596 - protein, 10 aa, synthetic construct
TALTPGFRFL

SEQ ID NO: 6597 - protein, 6 aa, synthetic construct
TDRLFK

SEQ ID NO: 6598 - protein, 10 aa, synthetic construct
ATLKVDRGFS

SEQ ID NO: 6599 - protein, 8 aa, synthetic construct
RLFRYRFE

SEQ ID NO: 6600 - protein, 8 aa, synthetic construct
TEWTGGFA

SEQ ID NO: 6601 - protein, 10 aa, synthetic construct
TKWHSLRGFW

SEQ ID NO: 6602 - protein, 9 aa, synthetic construct
TYVSSGRFV

SEQ ID NO: 6603 - protein, 7 aa, synthetic construct
LDLLVWE

SEQ ID NO: 6604 - protein, 10 aa, synthetic construct
TSMEMGYRKR

SEQ ID NO: 6605 - protein, 6 aa, synthetic construct
VTRAFT

SEQ ID NO: 6606 - protein, 8 aa, synthetic construct
TVFVRRFV

SEQ ID NO: 6607 - protein, 9 aa, synthetic construct
SSVSRSGLT

SEQ ID NO: 6608 - protein, 8 aa, synthetic construct
VVFNAIFH

SEQ ID NO: 6609 - protein, 8 aa, synthetic construct
TGVFKMFR

SEQ ID NO: 6610 - protein, 11 aa, synthetic construct
LDNSIAVIGVD

SEQ ID NO: 6611 - protein, 11 aa, synthetic construct
TVIGGRSFLFV

SEQ ID NO: 6612 - protein, 13 aa, synthetic construct
VFLVMDSRNSGFI

SEQ ID NO: 6613 - protein, 9 aa, synthetic construct
LLLLGMSVK

SEQ ID NO: 6614 - protein, 9 aa, synthetic construct
TTWAQSRFL

SEQ ID NO: 6615 - protein, 10 aa, synthetic construct
ACITVHKMFT

SEQ ID NO: 6616 - protein, 10 aa, synthetic construct
TGWHRVRYFV

SEQ ID NO: 6617 - protein, 9 aa, synthetic construct
TGLTNMRVC

SEQ ID NO: 6618 - protein, 10 aa, synthetic construct
SLWDGHGVVK

SEQ ID NO: 6619 - protein, 12 aa, synthetic construct
SAMNFAPGLRLQ

SEQ ID NO: 6620 - protein, 13 aa, synthetic construct
LSDNQVIMGVASL

SEQ ID NO: 6621 - protein, 8 aa, synthetic construct
TTIVRVFQ

SEQ ID NO: 6622 - protein, 9 aa, synthetic construct
CMVIDGRFK

SEQ ID NO: 6623 - protein, 9 aa, synthetic construct
HEVYVAVVR

SEQ ID NO: 6624 - protein, 9 aa, synthetic construct
IDPASDTLP

SEQ ID NO: 6625 - protein, 9 aa, synthetic construct
IEIDMRKGA

SEQ ID NO: 6626 - protein, 14 aa, synthetic construct
TVLVREGHRMFGFL

SEQ ID NO: 6627 - protein, 9 aa, synthetic construct
VCCHKWIFK

SEQ ID NO: 6628 - protein, 10 aa, synthetic construct
WTMVSRRGFA

SEQ ID NO: 6629 - protein, 14 aa, synthetic construct
VVVKVRQGTAFVWT

SEQ ID NO: 6630 - protein, 8 aa, synthetic construct
TIFGREKT

SEQ ID NO: 6631 - protein, 10 aa, synthetic construct
TGLGNDFVFK

SEQ ID NO: 6632 - protein, 10 aa, synthetic construct
VGFSEWNGFF

SEQ ID NO: 6633 - protein, 10 aa, synthetic construct
VVHIPGIGFG

SEQ ID NO: 6634 - protein, 9 aa, synthetic construct
ARVHDWMFE

SEQ ID NO: 6635 - protein, 14 aa, synthetic construct
TVLMRMNSRAVGFA

SEQ ID NO: 6636 - protein, 9 aa, synthetic construct
TVLDVGSFK

SEQ ID NO: 6637 - protein, 12 aa, synthetic construct
TVIDRTIYVVFR

SEQ ID NO: 6638 - protein, 9 aa, synthetic construct
TGIEIARFV

SEQ ID NO: 6639 - protein, 11 aa, synthetic construct
WINSNQLMDSR

SEQ ID NO: 6640 - protein, 9 aa, synthetic construct
NDSAVHAVV

SEQ ID NO: 6641 - protein, 8 aa, synthetic construct
DQVMGKGL

SEQ ID NO: 6642 - protein, 10 aa, synthetic construct
TGIRPELGRV

SEQ ID NO: 6643 - protein, 7 aa, synthetic construct
TSTVHFR

SEQ ID NO: 6644 - protein, 9 aa, synthetic construct
WSYDSSGFD

SEQ ID NO: 6645 - protein, 9 aa, synthetic construct
VVVRAVTFD

SEQ ID NO: 6646 - protein, 9 aa, synthetic construct
TTIGNGRVH

SEQ ID NO: 6647 - protein, 12 aa, synthetic construct
LRVHGVENVVDT

SEQ ID NO: 6648 - protein, 9 aa, synthetic construct
TRVLQFRFE

SEQ ID NO: 6649 - protein, 13 aa, synthetic construct
TLFVLAGRCGGFS

SEQ ID NO: 6650 - protein, 8 aa, synthetic construct
TALGSRFF

SEQ ID NO: 6651 - protein, 9 aa, synthetic construct
ESQTQGHNA

SEQ ID NO: 6652 - protein, 9 aa, synthetic construct
ATIQDGRFV

SEQ ID NO: 6653 - protein, 10 aa, synthetic construct
TAIGPNTYFS

SEQ ID NO: 6654 - protein, 9 aa, synthetic construct
TSIGRYRFV

SEQ ID NO: 6655 - protein, 9 aa, synthetic construct
VAMRPRGID

SEQ ID NO: 6656 - protein, 11 aa, synthetic construct
SIYLMGARIFG

SEQ ID NO: 6657 - protein, 9 aa, synthetic construct
VLLVKTMFK

SEQ ID NO: 6658 - protein, 14 aa, synthetic construct
TCVCYKADHKMSFK

SEQ ID NO: 6659 - protein, 11 aa, synthetic construct
THVSKVKPVFI

SEQ ID NO: 6660 - protein, 10 aa, synthetic construct
TVLFGRGVLR

SEQ ID NO: 6661 - protein, 9 aa, synthetic construct
TVCGVGGFK

SEQ ID NO: 6662 - protein, 12 aa, synthetic construct
TGLNRIPVRRFV

SEQ ID NO: 6663 - protein, 9 aa, synthetic construct
AIVGSGRII

SEQ ID NO: 6664 - protein, 10 aa, synthetic construct
VIMDSDDRFQ

SEQ ID NO: 6665 - protein, 8 aa, synthetic construct
TVLMDGIR

SEQ ID NO: 6666 - protein, 7 aa, synthetic construct
VASASKS

SEQ ID NO: 6667 - protein, 10 aa, synthetic construct
VCINRNWTFV

SEQ ID NO: 6668 - protein, 6 aa, synthetic construct
ITNRIR

SEQ ID NO: 6669 - protein, 10 aa, synthetic construct
TAVNSNCRFS

SEQ ID NO: 6670 - protein, 9 aa, synthetic construct
TVHVVHEFL

SEQ ID NO: 6671 - protein, 12 aa, synthetic construct
TWLNHIGVFDLR

SEQ ID NO: 6672 - protein, 9 aa, synthetic construct
IRADHVELL

SEQ ID NO: 6673 - protein, 9 aa, synthetic construct
TGIGCGLVV

SEQ ID NO: 6674 - protein, 9 aa, synthetic construct
TSLTTNKFL

SEQ ID NO: 6675 - protein, 9 aa, synthetic construct
TFVQGNKLV

SEQ ID NO: 6676 - protein, 10 aa, synthetic construct
VGHDPQSGFS

SEQ ID NO: 6677 - protein, 8 aa, synthetic construct
TELRDRVK

SEQ ID NO: 6678 - protein, 9 aa, synthetic construct
TNVEAVGFF

SEQ ID NO: 6679 - protein, 9 aa, synthetic construct
IGGFEDHCV

SEQ ID NO: 6680 - protein, 12 aa, synthetic construct
DGPTEGGRSAGV

SEQ ID NO: 6681 - protein, 10 aa, synthetic construct
IKFTVDRGFN

SEQ ID NO: 6682 - protein, 8 aa, synthetic construct
VQLKVVFV

SEQ ID NO: 6683 - protein, 9 aa, synthetic construct
TVVGIEGFM

SEQ ID NO: 6684 - protein, 8 aa, synthetic construct
GEKLNVLE

SEQ ID NO: 6685 - protein, 9 aa, synthetic construct
AEACSRDVV

SEQ ID NO: 6686 - protein, 12 aa, synthetic construct
VDLDLFRVSIIR

SEQ ID NO: 6687 - protein, 9 aa, synthetic construct
SCIESVSFA

SEQ ID NO: 6688 - protein, 9 aa, synthetic construct
TSFIGLGFR

SEQ ID NO: 6689 - protein, 14 aa, synthetic construct
METMIGKGTIVQVG

SEQ ID NO: 6690 - protein, 9 aa, synthetic construct
VVFNMMKFE

SEQ ID NO: 6691 - protein, 8 aa, synthetic construct
TTFISSFE

SEQ ID NO: 6692 - protein, 9 aa, synthetic construct
TVLVGERFI

SEQ ID NO: 6693 - protein, 10 aa, synthetic construct
VKLRAMLAFV

SEQ ID NO: 6694 - protein, 9 aa, synthetic construct
YTLILSAFI

SEQ ID NO: 6695 - protein, 10 aa, synthetic construct
ESVHRCDFMD

SEQ ID NO: 6696 - protein, 13 aa, synthetic construct
MDGHEYPARDRVV

SEQ ID NO: 6697 - protein, 10 aa, synthetic construct
TCLTVNMTFI

SEQ ID NO: 6698 - protein, 10 aa, synthetic construct
IAIKPGSGWN

SEQ ID NO: 6699 - protein, 9 aa, synthetic construct
SGFSGAVFL

SEQ ID NO: 6700 - protein, 10 aa, synthetic construct
VVVSRTLLFV

SEQ ID NO: 6701 - protein, 9 aa, synthetic construct
VQVDDQSDL

SEQ ID NO: 6702 - protein, 8 aa, synthetic construct
TAIGDGIK

SEQ ID NO: 6703 - protein, 9 aa, synthetic construct
LMIRKVGFV

SEQ ID NO: 6704 - protein, 6 aa, synthetic construct
VRMTFD

SEQ ID NO: 6705 - protein, 10 aa, synthetic construct
TVLRWNATFR

SEQ ID NO: 6706 - protein, 11 aa, synthetic construct
DVPRVRRGLVC

SEQ ID NO: 6707 - protein, 8 aa, synthetic construct
LCVSNRVR

SEQ ID NO: 6708 - protein, 6 aa, synthetic construct
TTKCFR

SEQ ID NO: 6709 - protein, 9 aa, synthetic construct
TIFTGVAFA

SEQ ID NO: 6710 - protein, 10 aa, synthetic construct
TVFTQAVFFR

SEQ ID NO: 6711 - protein, 10 aa, synthetic construct
TVVRVHIGFV

SEQ ID NO: 6712 - protein, 11 aa, synthetic construct
TGLSVMPVRKM

SEQ ID NO: 6713 - protein, 9 aa, synthetic construct
TVVYKICFM

SEQ ID NO: 6714 - protein, 14 aa, synthetic construct
TMFGVGVDGVISFC

SEQ ID NO: 6715 - protein, 13 aa, synthetic construct
AGFSVTQQGIGRV

SEQ ID NO: 6716 - protein, 10 aa, synthetic construct
SAIDERSRLR

SEQ ID NO: 6717 - protein, 8 aa, synthetic construct
IGWFQTQC

SEQ ID NO: 6718 - protein, 8 aa, synthetic construct
TVIINSFR

SEQ ID NO: 6719 - protein, 8 aa, synthetic construct
CVLSQGFI

SEQ ID NO: 6720 - protein, 13 aa, synthetic construct
TDVSWKVDKLVFS

SEQ ID NO: 6721 - protein, 10 aa, synthetic construct
TGIDNGRFVV

SEQ ID NO: 6722 - protein, 10 aa, synthetic construct
TMIGVRWAFT

SEQ ID NO: 6723 - protein, 8 aa, synthetic construct
ASFSVMFL

SEQ ID NO: 6724 - protein, 9 aa, synthetic construct
VVFAKDGFR

SEQ ID NO: 6725 - protein, 9 aa, synthetic construct
TGINLGYFV

SEQ ID NO: 6726 - protein, 9 aa, synthetic construct
TVQSILRFK

SEQ ID NO: 6727 - protein, 10 aa, synthetic construct
LRGDDDSLIE

SEQ ID NO: 6728 - protein, 8 aa, synthetic construct
SGFSNGFV

SEQ ID NO: 6729 - protein, 9 aa, synthetic construct
TVHKGGRFA

SEQ ID NO: 6730 - protein, 9 aa, synthetic construct
VRLVVMKFV

SEQ ID NO: 6731 - protein, 11 aa, synthetic construct
TCLNEALVHFH

SEQ ID NO: 6732 - protein, 9 aa, synthetic construct
TTLLNGIFL

SEQ ID NO: 6733 - protein, 9 aa, synthetic construct
VHIREFRFA

SEQ ID NO: 6734 - protein, 13 aa, synthetic construct
ILTNLSEHEMAFG

SEQ ID NO: 6735 - protein, 9 aa, synthetic construct
TAVMHRRFV

SEQ ID NO: 6736 - protein, 9 aa, synthetic construct
TVFGDYRFS

SEQ ID NO: 6737 - protein, 12 aa, synthetic construct
VNVVAGVGAFFL

SEQ ID NO: 6738 - protein, 6 aa, synthetic construct
ISFPWR

SEQ ID NO: 6739 - protein, 10 aa, synthetic construct
TTHVLMTGFS

SEQ ID NO: 6740 - protein, 8 aa, synthetic construct
VVLLSGLH

SEQ ID NO: 6741 - protein, 13 aa, synthetic construct
TVMRVGSNSWNFY

SEQ ID NO: 6742 - protein, 10 aa, synthetic construct
TVCSSNFVFA

SEQ ID NO: 6743 - protein, 10 aa, synthetic construct
TIFGRILLIL

SEQ ID NO: 6744 - protein, 9 aa, synthetic construct
TVVLVGRFI

SEQ ID NO: 6745 - protein, 8 aa, synthetic construct
TSWRSGFF

SEQ ID NO: 6746 - protein, 9 aa, synthetic construct
TVVDRIGID

SEQ ID NO: 6747 - protein, 9 aa, synthetic construct
TYLTVLGFA

SEQ ID NO: 6748 - protein, 9 aa, synthetic construct
TAFCGVQFI

SEQ ID NO: 6749 - protein, 8 aa, synthetic construct
VSVSNMIF

SEQ ID NO: 6750 - protein, 10 aa, synthetic construct
LEVTARGQIT

SEQ ID NO: 6751 - protein, 9 aa, synthetic construct
VLATESRFA

SEQ ID NO: 6752 - protein, 9 aa, synthetic construct
TVIYLGRIV

SEQ ID NO: 6753 - protein, 9 aa, synthetic construct
CTGKSYQGM

SEQ ID NO: 6754 - protein, 11 aa, synthetic construct
TDLDISHRRLF

SEQ ID NO: 6755 - protein, 9 aa, synthetic construct
VLTKTKTFQ

SEQ ID NO: 6756 - protein, 10 aa, synthetic construct
TMLSTAWRPH

SEQ ID NO: 6757 - protein, 10 aa, synthetic construct
TRHVSGRGFL

SEQ ID NO: 6758 - protein, 8 aa, synthetic construct
SALGEGFI

SEQ ID NO: 6759 - protein, 10 aa, synthetic construct
ECEIDDYRLV

SEQ ID NO: 6760 - protein, 9 aa, synthetic construct
DAISRDRYV

SEQ ID NO: 6761 - protein, 10 aa, synthetic construct
TAVSRRNGFL

SEQ ID NO: 6762 - protein, 9 aa, synthetic construct
TGLLFGRFV

SEQ ID NO: 6763 - protein, 8 aa, synthetic construct
TTWGRSFK

SEQ ID NO: 6764 - protein, 11 aa, synthetic construct
TRIDRHIYRFV

SEQ ID NO: 6765 - protein, 10 aa, synthetic construct
TVLISNVGFR

SEQ ID NO: 6766 - protein, 9 aa, synthetic construct
TSLCEQRLR

SEQ ID NO: 6767 - protein, 8 aa, synthetic construct
TICNRRFV

SEQ ID NO: 6768 - protein, 8 aa, synthetic construct
VALARQFD

SEQ ID NO: 6769 - protein, 9 aa, synthetic construct
TVVTLYRFL

SEQ ID NO: 6770 - protein, 8 aa, synthetic construct
SRAESCEC

SEQ ID NO: 6771 - protein, 10 aa, synthetic construct
VDIKCSRRRM

SEQ ID NO: 6772 - protein, 6 aa, synthetic construct
VTHRIR

SEQ ID NO: 6773 - protein, 10 aa, synthetic construct
TVIDPLVVFR

SEQ ID NO: 6774 - protein, 8 aa, synthetic construct
TLVSFWLG

SEQ ID NO: 6775 - protein, 8 aa, synthetic construct
TVLQATFK

SEQ ID NO: 6776 - protein, 8 aa, synthetic construct
TTLCVRFV

SEQ ID NO: 6777 - protein, 8 aa, synthetic construct
TTCDHHFE

SEQ ID NO: 6778 - protein, 6 aa, synthetic construct
VDHRII

SEQ ID NO: 6779 - protein, 12 aa, synthetic construct
TILRLGGQVRWV

SEQ ID NO: 6780 - protein, 10 aa, synthetic construct
TSLNMAHGFV

SEQ ID NO: 6781 - protein, 11 aa, synthetic construct
TCFSRGVRVFV

SEQ ID NO: 6782 - protein, 9 aa, synthetic construct
SSLLALRMV

SEQ ID NO: 6783 - protein, 9 aa, synthetic construct
TVWACGDFV

SEQ ID NO: 6784 - protein, 9 aa, synthetic construct
VTHETVSFR

SEQ ID NO: 6785 - protein, 8 aa, synthetic construct
SIISSGIK

SEQ ID NO: 6786 - protein, 10 aa, synthetic construct
TSIAGNARLR

SEQ ID NO: 6787 - protein, 10 aa, synthetic construct
SKFTFVSGLR

SEQ ID NO: 6788 - protein, 9 aa, synthetic construct
TVFVNGGFQ

SEQ ID NO: 6789 - protein, 9 aa, synthetic construct
VLWEDFKFT

SEQ ID NO: 6790 - protein, 14 aa, synthetic construct
TAMMTVPANYIGFC

SEQ ID NO: 6791 - protein, 11 aa, synthetic construct
TAMRLFRPFIL

SEQ ID NO: 6792 - protein, 10 aa, synthetic construct
TAVVPAGCFE

SEQ ID NO: 6793 - protein, 8 aa, synthetic construct
TGINVVFV

SEQ ID NO: 6794 - protein, 10 aa, synthetic construct
TGLSGCGTFD

SEQ ID NO: 6795 - protein, 8 aa, synthetic construct
TVLLIRFI

SEQ ID NO: 6796 - protein, 10 aa, synthetic construct
WGVTETYVFV

SEQ ID NO: 6797 - protein, 11 aa, synthetic construct
TTFRLSVGSFC

SEQ ID NO: 6798 - protein, 9 aa, synthetic construct
TRVDHLGFE

SEQ ID NO: 6799 - protein, 8 aa, synthetic construct
VVFVKKFL

SEQ ID NO: 6800 - protein, 8 aa, synthetic construct
TIWKRGFI

SEQ ID NO: 6801 - protein, 9 aa, synthetic construct
TVINDMGFK

SEQ ID NO: 6802 - protein, 9 aa, synthetic construct
TIMDMVVFK

SEQ ID NO: 6803 - protein, 9 aa, synthetic construct
TGFRIEGFI

SEQ ID NO: 6804 - protein, 10 aa, synthetic construct
VDSLMGDIGI

SEQ ID NO: 6805 - protein, 8 aa, synthetic construct
TLMKKRFW

SEQ ID NO: 6806 - protein, 13 aa, synthetic construct
VDYVVTNLMGGFV

SEQ ID NO: 6807 - protein, 9 aa, synthetic construct
TAVVRVRFL

SEQ ID NO: 6808 - protein, 9 aa, synthetic construct
TAYRLLGFW

SEQ ID NO: 6809 - protein, 14 aa, synthetic construct
VTIVLDGCNRLVKV

SEQ ID NO: 6810 - protein, 6 aa, synthetic construct
MYRDFV

SEQ ID NO: 6811 - protein, 9 aa, synthetic construct
TVFAGHQFV

SEQ ID NO: 6812 - protein, 9 aa, synthetic construct
TVFRMMNFS

SEQ ID NO: 6813 - protein, 10 aa, synthetic construct
VMRGVTGCDV

SEQ ID NO: 6814 - protein, 8 aa, synthetic construct
TIFDGCFS

SEQ ID NO: 6815 - protein, 9 aa, synthetic construct
VIFGPCGFT

SEQ ID NO: 6816 - protein, 9 aa, synthetic construct
TMAYEWRFL

SEQ ID NO: 6817 - protein, 10 aa, synthetic construct
TVVDLRRGFG

SEQ ID NO: 6818 - protein, 13 aa, synthetic construct
TNVESREARLMFM

SEQ ID NO: 6819 - protein, 10 aa, synthetic construct
PTVMIEKDQG

SEQ ID NO: 6820 - protein, 9 aa, synthetic construct
TGVSSHGFD

SEQ ID NO: 6821 - protein, 8 aa, synthetic construct
VVIENRFV

SEQ ID NO: 6822 - protein, 9 aa, synthetic construct
TTFGNFRFL

SEQ ID NO: 6823 - protein, 7 aa, synthetic construct
LITVPWE

SEQ ID NO: 6824 - protein, 8 aa, synthetic construct
WQCNQGFK

SEQ ID NO: 6825 - protein, 8 aa, synthetic construct
TVVNGGVT

SEQ ID NO: 6826 - protein, 8 aa, synthetic construct
TVFRNAFA

SEQ ID NO: 6827 - protein, 13 aa, synthetic construct
TTVKLDEGVVMLM

SEQ ID NO: 6828 - protein, 13 aa, synthetic construct
TFVDWVNYGVHVR

SEQ ID NO: 6829 - protein, 9 aa, synthetic construct
SCFVFPALT

SEQ ID NO: 6830 - protein, 9 aa, synthetic construct
THWLAPVLV

SEQ ID NO: 6831 - protein, 10 aa, synthetic construct
TQLEVPLHFV

SEQ ID NO: 6832 - protein, 9 aa, synthetic construct
TTVGKRRFL

SEQ ID NO: 6833 - protein, 10 aa, synthetic construct
SGIMDTGFLG

SEQ ID NO: 6834 - protein, 9 aa, synthetic construct
TLVNVGGIR

SEQ ID NO: 6835 - protein, 10 aa, synthetic construct
VMVGTASVFR

SEQ ID NO: 6836 - protein, 9 aa, synthetic construct
TCMAKMSFN

SEQ ID NO: 6837 - protein, 6 aa, synthetic construct
TELTFI

SEQ ID NO: 6838 - protein, 10 aa, synthetic construct
TQLWVVSGFT

SEQ ID NO: 6839 - protein, 7 aa, synthetic construct
VVGMGFM

SEQ ID NO: 6840 - protein, 10 aa, synthetic construct
FQRLSYVRFV

SEQ ID NO: 6841 - protein, 9 aa, synthetic construct
TTLNSFGLR

SEQ ID NO: 6842 - protein, 8 aa, synthetic construct
TSFHAALL

SEQ ID NO: 6843 - protein, 13 aa, synthetic construct
TGMNIRGDRAQID

SEQ ID NO: 6844 - protein, 10 aa, synthetic construct
IRERHELECS

SEQ ID NO: 6845 - protein, 9 aa, synthetic construct
CDVVDMRVY

SEQ ID NO: 6846 - protein, 9 aa, synthetic construct
AYMCASLFH

SEQ ID NO: 6847 - protein, 8 aa, synthetic construct
SVFKSRFL

SEQ ID NO: 6848 - protein, 11 aa, synthetic construct
TAIFLRLARFV

SEQ ID NO: 6849 - protein, 11 aa, synthetic construct
GYERLVLFWAN

SEQ ID NO: 6850 - protein, 6 aa, synthetic construct
LTERIR

SEQ ID NO: 6851 - protein, 9 aa, synthetic construct
TVISGGMIR

SEQ ID NO: 6852 - protein, 13 aa, synthetic construct
TCWVSSMGREFFR

SEQ ID NO: 6853 - protein, 10 aa, synthetic construct
TTVEAMWVFK

SEQ ID NO: 6854 - protein, 9 aa, synthetic construct
MGLVHRLFR

SEQ ID NO: 6855 - protein, 6 aa, synthetic construct
FGEDFM

SEQ ID NO: 6856 - protein, 10 aa, synthetic construct
TVFDGVRGFM

SEQ ID NO: 6857 - protein, 9 aa, synthetic construct
TAVSRVHIN

SEQ ID NO: 6858 - protein, 10 aa, synthetic construct
SIMSVTNRFG

SEQ ID NO: 6859 - protein, 10 aa, synthetic construct
EGFNCSMMLM

SEQ ID NO: 6860 - protein, 8 aa, synthetic construct
VVIDRYFL

SEQ ID NO: 6861 - protein, 13 aa, synthetic construct
LIVGLVSARINIR

SEQ ID NO: 6862 - protein, 10 aa, synthetic construct
TGFVAGTGFD

SEQ ID NO: 6863 - protein, 9 aa, synthetic construct
MDEVTTVGT

SEQ ID NO: 6864 - protein, 9 aa, synthetic construct
TCINRHHFV

SEQ ID NO: 6865 - protein, 10 aa, synthetic construct
TVLHVRHGFV

SEQ ID NO: 6866 - protein, 10 aa, synthetic construct
VSIGNVQFFV

SEQ ID NO: 6867 - protein, 10 aa, synthetic construct
STLDVVGMFC

SEQ ID NO: 6868 - protein, 8 aa, synthetic construct
VVWSLNFS

SEQ ID NO: 6869 - protein, 9 aa, synthetic construct
TRMIGGRFK

SEQ ID NO: 6870 - protein, 11 aa, synthetic construct
TAMNAAVGLFR

SEQ ID NO: 6871 - protein, 9 aa, synthetic construct
TSYIVTKFL

SEQ ID NO: 6872 - protein, 9 aa, synthetic construct
TVFTRSGFG

SEQ ID NO: 6873 - protein, 10 aa, synthetic construct
WVILSVGGIM

SEQ ID NO: 6874 - protein, 8 aa, synthetic construct
TAIALGFN

SEQ ID NO: 6875 - protein, 9 aa, synthetic construct
VAVTSHSFG

SEQ ID NO: 6876 - protein, 13 aa, synthetic construct
TSINVCSKFIKFR

SEQ ID NO: 6877 - protein, 6 aa, synthetic construct
ISQWSK

SEQ ID NO: 6878 - protein, 6 aa, synthetic construct
FTMLLL

SEQ ID NO: 6879 - protein, 9 aa, synthetic construct
VRTITDVGI

SEQ ID NO: 6880 - protein, 8 aa, synthetic construct
TVIDGGFR

SEQ ID NO: 6881 - protein, 8 aa, synthetic construct
TTFARRFV

SEQ ID NO: 6882 - protein, 9 aa, synthetic construct
ATLHSHDFM

SEQ ID NO: 6883 - protein, 9 aa, synthetic construct
IFFTRGGFD

SEQ ID NO: 6884 - protein, 6 aa, synthetic construct
VSIRFM

SEQ ID NO: 6885 - protein, 9 aa, synthetic construct
TDCVDIGFR

SEQ ID NO: 6886 - protein, 9 aa, synthetic construct
TSIMLGGFK

SEQ ID NO: 6887 - protein, 10 aa, synthetic construct
TSISGTFAIV

SEQ ID NO: 6888 - protein, 11 aa, synthetic construct
TSWTGNLCGFE

SEQ ID NO: 6889 - protein, 6 aa, synthetic construct
VSNRIR

SEQ ID NO: 6890 - protein, 8 aa, synthetic construct
TLLVRGVR

SEQ ID NO: 6891 - protein, 6 aa, synthetic construct
VYVDFK

SEQ ID NO: 6892 - protein, 10 aa, synthetic construct
WGVRTVVGFF

SEQ ID NO: 6893 - protein, 9 aa, synthetic construct
TLLCRDGFR

SEQ ID NO: 6894 - protein, 8 aa, synthetic construct
TMLNVRFS

SEQ ID NO: 6895 - protein, 6 aa, synthetic construct
VDTRIV

SEQ ID NO: 6896 - protein, 8 aa, synthetic construct
VKWSGTFV

SEQ ID NO: 6897 - protein, 6 aa, synthetic construct
TGLDSL

SEQ ID NO: 6898 - protein, 9 aa, synthetic construct
TVLVHRFLK

SEQ ID NO: 6899 - protein, 9 aa, synthetic construct
VQLVKLRFI

SEQ ID NO: 6900 - protein, 11 aa, synthetic construct
TKYSPNSFCFT

SEQ ID NO: 6901 - protein, 8 aa, synthetic construct
VAREFVMD

SEQ ID NO: 6902 - protein, 7 aa, synthetic construct
LGNQFQE

SEQ ID NO: 6903 - protein, 11 aa, synthetic construct
DPFVLFHHRMK

SEQ ID NO: 6904 - protein, 9 aa, synthetic construct
VRFVLVKFC

SEQ ID NO: 6905 - protein, 9 aa, synthetic construct
TVLIGPLIR

SEQ ID NO: 6906 - protein, 9 aa, synthetic construct
TCITRLGFF

SEQ ID NO: 6907 - protein, 9 aa, synthetic construct
TGIATHGIK

SEQ ID NO: 6908 - protein, 7 aa, synthetic construct
MLAKSLI

SEQ ID NO: 6909 - protein, 6 aa, synthetic construct
EGPRWE

SEQ ID NO: 6910 - protein, 6 aa, synthetic construct
TAVSAR

SEQ ID NO: 6911 - protein, 9 aa, synthetic construct
DDVQMVVNR

SEQ ID NO: 6912 - protein, 8 aa, synthetic construct
VLVDGGFI

SEQ ID NO: 6913 - protein, 8 aa, synthetic construct
WPWWMEPT

SEQ ID NO: 6914 - protein, 14 aa, synthetic construct
TGFGRTIEAFGRLD

SEQ ID NO: 6915 - protein, 10 aa, synthetic construct
VACVCVLRSP

SEQ ID NO: 6916 - protein, 11 aa, synthetic construct
GVDTFLHEQLP

SEQ ID NO: 6917 - protein, 9 aa, synthetic construct
TALVCSGFS

SEQ ID NO: 6918 - protein, 9 aa, synthetic construct
WIVTRFSFE

SEQ ID NO: 6919 - protein, 9 aa, synthetic construct
VYVYHTRFA

SEQ ID NO: 6920 - protein, 11 aa, synthetic construct
TEFDSVNPHFR

SEQ ID NO: 6921 - protein, 13 aa, synthetic construct
TKLVQLIGFVGFV

SEQ ID NO: 6922 - protein, 9 aa, synthetic construct
TSLSVVGFK

SEQ ID NO: 6923 - protein, 11 aa, synthetic construct
TVVNRGTWTFE

SEQ ID NO: 6924 - protein, 13 aa, synthetic construct
AITDAFLVDVART

SEQ ID NO: 6925 - protein, 6 aa, synthetic construct
DRRDVR

SEQ ID NO: 6926 - protein, 6 aa, synthetic construct
LDGSLE

SEQ ID NO: 6927 - protein, 7 aa, synthetic construct
SGSMTGP

SEQ ID NO: 6928 - protein, 6 aa, synthetic construct
LHVARE

SEQ ID NO: 6929 - protein, 9 aa, synthetic construct
TVLTHMRFA

SEQ ID NO: 6930 - protein, 10 aa, synthetic construct
TSWYRGTGFR

SEQ ID NO: 6931 - protein, 8 aa, synthetic construct
VGFMHGFQ

SEQ ID NO: 6932 - protein, 11 aa, synthetic construct
SAFIRRIWRLT

SEQ ID NO: 6933 - protein, 6 aa, synthetic construct
TSADFL

SEQ ID NO: 6934 - protein, 10 aa, synthetic construct
TVFNIGHGFM

SEQ ID NO: 6935 - protein, 9 aa, synthetic construct
SVIVGGLFV

SEQ ID NO: 6936 - protein, 13 aa, synthetic construct
TLILRTLDRVGVY

SEQ ID NO: 6937 - protein, 10 aa, synthetic construct
TMVDSRFGFV

SEQ ID NO: 6938 - protein, 8 aa, synthetic construct
STFSGCYV

SEQ ID NO: 6939 - protein, 8 aa, synthetic construct
LIVDNRIR

SEQ ID NO: 6940 - protein, 9 aa, synthetic construct
TVFDMQGFH

SEQ ID NO: 6941 - protein, 13 aa, synthetic construct
WVVIVGALGVRLS

SEQ ID NO: 6942 - protein, 9 aa, synthetic construct
TRVSVGRIG

SEQ ID NO: 6943 - protein, 9 aa, synthetic construct
MVFRSGAFL

SEQ ID NO: 6944 - protein, 10 aa, synthetic construct
CRNMMDIDGS

SEQ ID NO: 6945 - protein, 10 aa, synthetic construct
TCCGESTGFV

SEQ ID NO: 6946 - protein, 7 aa, synthetic construct
LNVIPWL

SEQ ID NO: 6947 - protein, 10 aa, synthetic construct
VMIVLNGMFH

SEQ ID NO: 6948 - protein, 9 aa, synthetic construct
TVIVAVAFK

SEQ ID NO: 6949 - protein, 9 aa, synthetic construct
TGIHKKLIA

SEQ ID NO: 6950 - protein, 9 aa, synthetic construct
VTFVDNRFV

SEQ ID NO: 6951 - protein, 9 aa, synthetic construct
TTLKVVGFV

SEQ ID NO: 6952 - protein, 9 aa, synthetic construct
TVFTGRGFV

SEQ ID NO: 6953 - protein, 9 aa, synthetic construct
TMYGDHRFL

SEQ ID NO: 6954 - protein, 14 aa, synthetic construct
MRVAGDVEALRNSG

SEQ ID NO: 6955 - protein, 10 aa, synthetic construct
VAVVKKVGFI

SEQ ID NO: 6956 - protein, 7 aa, synthetic construct
VGTVIEV

SEQ ID NO: 6957 - protein, 8 aa, synthetic construct
TVIDGRFR

SEQ ID NO: 6958 - protein, 9 aa, synthetic construct
GQDCIADVS

SEQ ID NO: 6959 - protein, 9 aa, synthetic construct
VRWVQKFFQ

SEQ ID NO: 6960 - protein, 9 aa, synthetic construct
TSCNGGRLA

SEQ ID NO: 6961 - protein, 9 aa, synthetic construct
TAVAERRFR

SEQ ID NO: 6962 - protein, 9 aa, synthetic construct
VMIRLNRFN

SEQ ID NO: 6963 - protein, 9 aa, synthetic construct
MQLLQDLNG

SEQ ID NO: 6964 - protein, 13 aa, synthetic construct
EAVRFLIGTFVIT

SEQ ID NO: 6965 - protein, 9 aa, synthetic construct
TGFECFVIS

SEQ ID NO: 6966 - protein, 10 aa, synthetic construct
TVIQHPIRFA

SEQ ID NO: 6967 - protein, 10 aa, synthetic construct
VCLDYYWRFA

SEQ ID NO: 6968 - protein, 8 aa, synthetic construct
LRTVMCRT

SEQ ID NO: 6969 - protein, 9 aa, synthetic construct
TGFTGVQFI

SEQ ID NO: 6970 - protein, 5 aa, synthetic construct
RTAVA

SEQ ID NO: 6971 - protein, 10 aa, synthetic construct
TCYSYVTGFI

SEQ ID NO: 6972 - protein, 9 aa, synthetic construct
TTWDFAGCL

SEQ ID NO: 6973 - protein, 9 aa, synthetic construct
MGIMTSRLV

SEQ ID NO: 6974 - protein, 8 aa, synthetic construct
SCWSTVKR

SEQ ID NO: 6975 - protein, 13 aa, synthetic construct
DRSDLHESCSEKF

SEQ ID NO: 6976 - protein, 7 aa, synthetic construct
ISVREEM

SEQ ID NO: 6977 - protein, 9 aa, synthetic construct
VGLAAKGFE

SEQ ID NO: 6978 - protein, 9 aa, synthetic construct
TAFGSDGRT

SEQ ID NO: 6979 - protein, 9 aa, synthetic construct
TVWARIGFE

SEQ ID NO: 6980 - protein, 6 aa, synthetic construct
NGLHIG

SEQ ID NO: 6981 - protein, 9 aa, synthetic construct
TCLNNQSFR

SEQ ID NO: 6982 - protein, 9 aa, synthetic construct
LDGVANDNT

SEQ ID NO: 6983 - protein, 12 aa, synthetic construct
LRLVSVLSRTAN

SEQ ID NO: 6984 - protein, 8 aa, synthetic construct
TTWHNGFH

SEQ ID NO: 6985 - protein, 9 aa, synthetic construct
LVVHVLMIR

SEQ ID NO: 6986 - protein, 6 aa, synthetic construct
AADRQI

SEQ ID NO: 6987 - protein, 10 aa, synthetic construct
VPDDMADRVL

SEQ ID NO: 6988 - protein, 9 aa, synthetic construct
MGISRMTVV

SEQ ID NO: 6989 - protein, 7 aa, synthetic construct
LTIWGWD

SEQ ID NO: 6990 - protein, 10 aa, synthetic construct
TVFVVALGIH

SEQ ID NO: 6991 - protein, 9 aa, synthetic construct
TKWQACTFT

SEQ ID NO: 6992 - protein, 9 aa, synthetic construct
TGLFDNVII

SEQ ID NO: 6993 - protein, 8 aa, synthetic construct
GGAVPDIR

SEQ ID NO: 6994 - protein, 9 aa, synthetic construct
TVLSNDGLK

SEQ ID NO: 6995 - protein, 9 aa, synthetic construct
TAVVRIGFR

SEQ ID NO: 6996 - protein, 9 aa, synthetic construct
SHIAHFRPV

SEQ ID NO: 6997 - protein, 9 aa, synthetic construct
TRFGGIRFV

SEQ ID NO: 6998 - protein, 10 aa, synthetic construct
AILTGMKSMV

SEQ ID NO: 6999 - protein, 8 aa, synthetic construct
TFFDGGFV

SEQ ID NO: 7000 - protein, 8 aa, synthetic construct
YHLDMGVM

SEQ ID NO: 7001 - protein, 11 aa, synthetic construct
QDVRRATGRVA

SEQ ID NO: 7002 - protein, 9 aa, synthetic construct
LTVCNDGFV

SEQ ID NO: 7003 - protein, 6 aa, synthetic construct
LSLRAR

SEQ ID NO: 7004 - protein, 9 aa, synthetic construct
TAMGTTAFS

SEQ ID NO: 7005 - protein, 9 aa, synthetic construct
TILGRMGVV

SEQ ID NO: 7006 - protein, 9 aa, synthetic construct
TAVMKGGFL

SEQ ID NO: 7007 - protein, 9 aa, synthetic construct
TSIDRGSFT

SEQ ID NO: 7008 - protein, 9 aa, synthetic construct
TALVMLHFV

SEQ ID NO: 7009 - protein, 11 aa, synthetic construct
SHWCNARPAFY

SEQ ID NO: 7010 - protein, 7 aa, synthetic construct
LVLQTWT

SEQ ID NO: 7011 - protein, 14 aa, synthetic construct
QPGVDVGFDELRIQ

SEQ ID NO: 7012 - protein, 8 aa, synthetic construct
TSWSGRFF

SEQ ID NO: 7013 - protein, 10 aa, synthetic construct
WGVTGKALFE

SEQ ID NO: 7014 - protein, 14 aa, synthetic construct
HVLQIPGSIEVPKY

SEQ ID NO: 7015 - protein, 9 aa, synthetic construct
TVLSLGGFG

SEQ ID NO: 7016 - protein, 8 aa, synthetic construct
NDRDLMVD

SEQ ID NO: 7017 - protein, 9 aa, synthetic construct
VVWMAKTFL

SEQ ID NO: 7018 - protein, 6 aa, synthetic construct
TSTFFV

SEQ ID NO: 7019 - protein, 9 aa, synthetic construct
TTFMITGFL

SEQ ID NO: 7020 - protein, 11 aa, synthetic construct
TSFHVGLWKFV

SEQ ID NO: 7021 - protein, 10 aa, synthetic construct
IMVRVSIVFA

SEQ ID NO: 7022 - protein, 9 aa, synthetic construct
TCLTDTGFA

SEQ ID NO: 7023 - protein, 6 aa, synthetic construct
TGLTFQ

SEQ ID NO: 7024 - protein, 10 aa, synthetic construct
TYFVISAGFT

SEQ ID NO: 7025 - protein, 8 aa, synthetic construct
TAWDLVKL

SEQ ID NO: 7026 - protein, 9 aa, synthetic construct
TVMSSRGVG

SEQ ID NO: 7027 - protein, 9 aa, synthetic construct
TAVEKGIFQ

SEQ ID NO: 7028 - protein, 9 aa, synthetic construct
TYVGVAGIE

SEQ ID NO: 7029 - protein, 9 aa, synthetic construct
TNFVLGGFV

SEQ ID NO: 7030 - protein, 9 aa, synthetic construct
TIMALVMFE

SEQ ID NO: 7031 - protein, 10 aa, synthetic construct
TVILAIVSFV

SEQ ID NO: 7032 - protein, 9 aa, synthetic construct
TCVRQSRFW

SEQ ID NO: 7033 - protein, 10 aa, synthetic construct
TALGGDMFFH

SEQ ID NO: 7034 - protein, 9 aa, synthetic construct
VSVRIAGFV

SEQ ID NO: 7035 - protein, 11 aa, synthetic construct
TSWNSDFNGAR

SEQ ID NO: 7036 - protein, 8 aa, synthetic construct
TGFDGIFH

SEQ ID NO: 7037 - protein, 10 aa, synthetic construct
TGVNVIYRLV

SEQ ID NO: 7038 - protein, 14 aa, synthetic construct
TKFVMRTSLSGRVL

SEQ ID NO: 7039 - protein, 9 aa, synthetic construct
TIVRSHKFF

SEQ ID NO: 7040 - protein, 6 aa, synthetic construct
TGMNFG

SEQ ID NO: 7041 - protein, 6 aa, synthetic construct
TTTGFH

SEQ ID NO: 7042 - protein, 8 aa, synthetic construct
TVLVKRFA

SEQ ID NO: 7043 - protein, 10 aa, synthetic construct
LTIDVDFLIR

SEQ ID NO: 7044 - protein, 9 aa, synthetic construct
TVLSQSGFR

SEQ ID NO: 7045 - protein, 9 aa, synthetic construct
TIFGSGRFF

SEQ ID NO: 7046 - protein, 9 aa, synthetic construct
TALIRNGFV

SEQ ID NO: 7047 - protein, 8 aa, synthetic construct
VAWDLRFR

SEQ ID NO: 7048 - protein, 9 aa, synthetic construct
LLVVQGKFM

SEQ ID NO: 7049 - protein, 10 aa, synthetic construct
TGLKDFRTFF

SEQ ID NO: 7050 - protein, 10 aa, synthetic construct
TALLVRRGFL

SEQ ID NO: 7051 - protein, 9 aa, synthetic construct
VVFCVSGFV

SEQ ID NO: 7052 - protein, 11 aa, synthetic construct
TIMCTVNHSII

SEQ ID NO: 7053 - protein, 9 aa, synthetic construct
SSWTRYVMV

SEQ ID NO: 7054 - protein, 10 aa, synthetic construct
VVLVERGHFM

SEQ ID NO: 7055 - protein, 6 aa, synthetic construct
TVLNFE

SEQ ID NO: 7056 - protein, 9 aa, synthetic construct
SCFGRSVIR

SEQ ID NO: 7057 - protein, 8 aa, synthetic construct
VVFKVRVL

SEQ ID NO: 7058 - protein, 10 aa, synthetic construct
LAVISMRHFV

SEQ ID NO: 7059 - protein, 9 aa, synthetic construct
TVVGIEGFR

SEQ ID NO: 7060 - protein, 8 aa, synthetic construct
SVWQHMFR

SEQ ID NO: 7061 - protein, 13 aa, synthetic construct
NDRHAVGRISSSN

SEQ ID NO: 7062 - protein, 9 aa, synthetic construct
TGFQHGAFV

SEQ ID NO: 7063 - protein, 9 aa, synthetic construct
SKIMTAGFV

SEQ ID NO: 7064 - protein, 10 aa, synthetic construct
VYYDVRRGFC

SEQ ID NO: 7065 - protein, 9 aa, synthetic construct
SCIMLVGMT

SEQ ID NO: 7066 - protein, 9 aa, synthetic construct
TRFLTLGFV

SEQ ID NO: 7067 - protein, 8 aa, synthetic construct
TVLAIVFR

SEQ ID NO: 7068 - protein, 8 aa, synthetic construct
VIIECRIT

SEQ ID NO: 7069 - protein, 10 aa, synthetic construct
TAVRRDMLFR

SEQ ID NO: 7070 - protein, 13 aa, synthetic construct
TVLKTGGARIAVL

SEQ ID NO: 7071 - protein, 9 aa, synthetic construct
VLVYGGRFS

SEQ ID NO: 7072 - protein, 7 aa, synthetic construct
VEVPNPI

SEQ ID NO: 7073 - protein, 11 aa, synthetic construct
AIININLMRFV

SEQ ID NO: 7074 - protein, 8 aa, synthetic construct
MVFANRFC

SEQ ID NO: 7075 - protein, 8 aa, synthetic construct
TCIGDGFL

SEQ ID NO: 7076 - protein, 10 aa, synthetic construct
VRYAMKLGFM

SEQ ID NO: 7077 - protein, 9 aa, synthetic construct
LSMKQMGIG

SEQ ID NO: 7078 - protein, 6 aa, synthetic construct
DVGGAE

SEQ ID NO: 7079 - protein, 9 aa, synthetic construct
TVLIDYRFR

SEQ ID NO: 7080 - protein, 13 aa, synthetic construct
SSLVGGRFNIKLV

SEQ ID NO: 7081 - protein, 8 aa, synthetic construct
VTFNIGFQ

SEQ ID NO: 7082 - protein, 8 aa, synthetic construct
TAFTDTFT

SEQ ID NO: 7083 - protein, 11 aa, synthetic construct
TIFPGVRGLID

SEQ ID NO: 7084 - protein, 9 aa, synthetic construct
WGLKDSMFF

SEQ ID NO: 7085 - protein, 10 aa, synthetic construct
TSLQVTGRFV

SEQ ID NO: 7086 - protein, 8 aa, synthetic construct
TAVLHGVH

SEQ ID NO: 7087 - protein, 9 aa, synthetic construct
TYVVVGRIV

SEQ ID NO: 7088 - protein, 10 aa, synthetic construct
TIVVNNYGFV

SEQ ID NO: 7089 - protein, 4 aa, synthetic construct
SDGL

SEQ ID NO: 7090 - protein, 10 aa, synthetic construct
TALDVTRCFR

SEQ ID NO: 7091 - protein, 9 aa, synthetic construct
VHDSVDSYP

SEQ ID NO: 7092 - protein, 8 aa, synthetic construct
TSYRLRFH

SEQ ID NO: 7093 - protein, 6 aa, synthetic construct
DGHGVQ

SEQ ID NO: 7094 - protein, 9 aa, synthetic construct
VTLAAGTFA

SEQ ID NO: 7095 - protein, 8 aa, synthetic construct
DEDHLMQM

SEQ ID NO: 7096 - protein, 7 aa, synthetic construct
DTDKARI

SEQ ID NO: 7097 - protein, 10 aa, synthetic construct
TVVHFVTGFL

SEQ ID NO: 7098 - protein, 14 aa, synthetic construct
TMLEGVDTGALVFR

SEQ ID NO: 7099 - protein, 9 aa, synthetic construct
SVFAGYRLH

SEQ ID NO: 7100 - protein, 10 aa, synthetic construct
GLGQETNLHL

SEQ ID NO: 7101 - protein, 9 aa, synthetic construct
TSFDSMRFV

SEQ ID NO: 7102 - protein, 13 aa, synthetic construct
IGFIPIEQRFHFR

SEQ ID NO: 7103 - protein, 11 aa, synthetic construct
VGSDARDDVNC

SEQ ID NO: 7104 - protein, 8 aa, synthetic construct
TTIGFKFQ

SEQ ID NO: 7105 - protein, 9 aa, synthetic construct
TAIIMPRMF

SEQ ID NO: 7106 - protein, 11 aa, synthetic construct
TRVNGSAALIR

SEQ ID NO: 7107 - protein, 10 aa, synthetic construct
VVFLRGFGFR

SEQ ID NO: 7108 - protein, 11 aa, synthetic construct
DGFDAGSGRFS

SEQ ID NO: 7109 - protein, 9 aa, synthetic construct
TIIDETMFA

SEQ ID NO: 7110 - protein, 11 aa, synthetic construct
STFLFEIGSLM

SEQ ID NO: 7111 - protein, 10 aa, synthetic construct
ICIDVPRHFC

SEQ ID NO: 7112 - protein, 10 aa, synthetic construct
TTLANAIGFV

SEQ ID NO: 7113 - protein, 9 aa, synthetic construct
TMLAHRHIG

SEQ ID NO: 7114 - protein, 11 aa, synthetic construct
TIFAPRTHKFE

SEQ ID NO: 7115 - protein, 9 aa, synthetic construct
TRLSNGHFA

SEQ ID NO: 7116 - protein, 9 aa, synthetic construct
SVLRGRFCA

SEQ ID NO: 7117 - protein, 9 aa, synthetic construct
TYLFAGLFL

SEQ ID NO: 7118 - protein, 11 aa, synthetic construct
TRCNAFRSRFD

SEQ ID NO: 7119 - protein, 10 aa, synthetic construct
TVVRRLWGFD

SEQ ID NO: 7120 - protein, 10 aa, synthetic construct
YIVSRQKFGL

SEQ ID NO: 7121 - protein, 13 aa, synthetic construct
TTIGHRHFVTGWV

SEQ ID NO: 7122 - protein, 4 aa, synthetic construct
WTYG

SEQ ID NO: 7123 - protein, 10 aa, synthetic construct
VVVQAVGVIV

SEQ ID NO: 7124 - protein, 9 aa, synthetic construct
MEGDCPLSL

SEQ ID NO: 7125 - protein, 9 aa, synthetic construct
TVFDGGQFL

SEQ ID NO: 7126 - protein, 9 aa, synthetic construct
TTWNAGPFL

SEQ ID NO: 7127 - protein, 9 aa, synthetic construct
AGVQVTARG

SEQ ID NO: 7128 - protein, 14 aa, synthetic construct
LSRVRAGGGEIHWV

SEQ ID NO: 7129 - protein, 8 aa, synthetic construct
TALVLYVV

SEQ ID NO: 7130 - protein, 6 aa, synthetic construct
MLRGGD

SEQ ID NO: 7131 - protein, 9 aa, synthetic construct
TARGLVGFL

SEQ ID NO: 7132 - protein, 10 aa, synthetic construct
TVYMRQCRFI

SEQ ID NO: 7133 - protein, 10 aa, synthetic construct
TTTGSIKFIN

SEQ ID NO: 7134 - protein, 10 aa, synthetic construct
TVVSQARRFL

SEQ ID NO: 7135 - protein, 8 aa, synthetic construct
TVLSRSID

SEQ ID NO: 7136 - protein, 9 aa, synthetic construct
TGHDMEHFS

SEQ ID NO: 7137 - protein, 11 aa, synthetic construct
TGFIVGGLNIV

SEQ ID NO: 7138 - protein, 14 aa, synthetic construct
LGREVRSGNYVRIV

SEQ ID NO: 7139 - protein, 10 aa, synthetic construct
VTVDFDVGFL

SEQ ID NO: 7140 - protein, 9 aa, synthetic construct
SLWTGSRLT

SEQ ID NO: 7141 - protein, 10 aa, synthetic construct
TRVGASGRFH

SEQ ID NO: 7142 - protein, 6 aa, synthetic construct
TTTDFG

SEQ ID NO: 7143 - protein, 13 aa, synthetic construct
TCTRLREVRLSFV

SEQ ID NO: 7144 - protein, 8 aa, synthetic construct
TVMSNTFA

SEQ ID NO: 7145 - protein, 9 aa, synthetic construct
VVVVDMRFQ

SEQ ID NO: 7146 - protein, 9 aa, synthetic construct
TVFGDLGFI

SEQ ID NO: 7147 - protein, 8 aa, synthetic construct
TAIQRIFV

SEQ ID NO: 7148 - protein, 9 aa, synthetic construct
TSLGDDAFE

SEQ ID NO: 7149 - protein, 9 aa, synthetic construct
GVVSSAGWA

SEQ ID NO: 7150 - protein, 10 aa, synthetic construct
SVIGILERPK

SEQ ID NO: 7151 - protein, 11 aa, synthetic construct
VILDVACFRFI

SEQ ID NO: 7152 - protein, 9 aa, synthetic construct
TVVKQLHFW

SEQ ID NO: 7153 - protein, 9 aa, synthetic construct
VVMVFTMFR

SEQ ID NO: 7154 - protein, 8 aa, synthetic construct
LGFFNDSA

SEQ ID NO: 7155 - protein, 10 aa, synthetic construct
TVHLLRRGFA

SEQ ID NO: 7156 - protein, 9 aa, synthetic construct
SAIKAPRFV

SEQ ID NO: 7157 - protein, 10 aa, synthetic construct
TVLIMPAAFV

SEQ ID NO: 7158 - protein, 9 aa, synthetic construct
VGLTSGFFA

SEQ ID NO: 7159 - protein, 9 aa, synthetic construct
SVWNWDRFN

SEQ ID NO: 7160 - protein, 13 aa, synthetic construct
CVVVRSGMGFGFM

SEQ ID NO: 7161 - protein, 10 aa, synthetic construct
TYVGRIGFGL

SEQ ID NO: 7162 - protein, 9 aa, synthetic construct
MMVEVDGFS

SEQ ID NO: 7163 - protein, 9 aa, synthetic construct
VRNDGRGFL

SEQ ID NO: 7164 - protein, 8 aa, synthetic construct
LAIGAKIR

SEQ ID NO: 7165 - protein, 9 aa, synthetic construct
TTYHMRVFG

SEQ ID NO: 7166 - protein, 7 aa, synthetic construct
DAQVGVI

SEQ ID NO: 7167 - protein, 5 aa, synthetic construct
SQIFE

SEQ ID NO: 7168 - protein, 11 aa, synthetic construct
VCVRNNFRLFS

SEQ ID NO: 7169 - protein, 10 aa, synthetic construct
TNYGAVVGFL

SEQ ID NO: 7170 - protein, 8 aa, synthetic construct
VVIGDTFT

SEQ ID NO: 7171 - protein, 13 aa, synthetic construct
VLFSGSVNNERFL

SEQ ID NO: 7172 - protein, 9 aa, synthetic construct
SLYWPPNIL

SEQ ID NO: 7173 - protein, 10 aa, synthetic construct
TCITNVGAMV

SEQ ID NO: 7174 - protein, 9 aa, synthetic construct
TAFLDNGFK

SEQ ID NO: 7175 - protein, 10 aa, synthetic construct
TSVRVSGFFD

SEQ ID NO: 7176 - protein, 11 aa, synthetic construct
WIIGTSNPRFL

SEQ ID NO: 7177 - protein, 10 aa, synthetic construct
TTVMPRIGFV

SEQ ID NO: 7178 - protein, 11 aa, synthetic construct
VSVARDTCMFW

SEQ ID NO: 7179 - protein, 9 aa, synthetic construct
WEVVRVGFI

SEQ ID NO: 7180 - protein, 6 aa, synthetic construct
LYMDWT

SEQ ID NO: 7181 - protein, 9 aa, synthetic construct
CCLENIKFT

SEQ ID NO: 7182 - protein, 9 aa, synthetic construct
VLFSTDGVE

SEQ ID NO: 7183 - protein, 10 aa, synthetic construct
TAMVDNVGIH

SEQ ID NO: 7184 - protein, 4 aa, synthetic construct
LLRG

SEQ ID NO: 7185 - protein, 13 aa, synthetic construct
TVFRGADAISPFG

SEQ ID NO: 7186 - protein, 7 aa, synthetic construct
ACFTVRA

SEQ ID NO: 7187 - protein, 12 aa, synthetic construct
TVFVPLVVRKFM

SEQ ID NO: 7188 - protein, 9 aa, synthetic construct
TSLSRGRAR

SEQ ID NO: 7189 - protein, 4 aa, synthetic construct
MFVR

SEQ ID NO: 7190 - protein, 10 aa, synthetic construct
TMLKVTQRFL

SEQ ID NO: 7191 - protein, 10 aa, synthetic construct
SVWDSAFRLL

SEQ ID NO: 7192 - protein, 12 aa, synthetic construct
TSLQGHRSFSFV

SEQ ID NO: 7193 - protein, 6 aa, synthetic construct
TSVFFE

SEQ ID NO: 7194 - protein, 9 aa, synthetic construct
TVVTNARFH

SEQ ID NO: 7195 - protein, 10 aa, synthetic construct
GEAGPTNELR

SEQ ID NO: 7196 - protein, 8 aa, synthetic construct
SVMRGRLM

SEQ ID NO: 7197 - protein, 12 aa, synthetic construct
TVVTGMRLMWFF

SEQ ID NO: 7198 - protein, 9 aa, synthetic construct
TMIMSAGFI

SEQ ID NO: 7199 - protein, 9 aa, synthetic construct
TILGAGWLM

SEQ ID NO: 7200 - protein, 13 aa, synthetic construct
SIMVVVNSVVRLM

SEQ ID NO: 7201 - protein, 12 aa, synthetic construct
TVIQVHELIGIR

SEQ ID NO: 7202 - protein, 10 aa, synthetic construct
TIYGSMSGFE

SEQ ID NO: 7203 - protein, 8 aa, synthetic construct
VVVSVRFV

SEQ ID NO: 7204 - protein, 14 aa, synthetic construct
KLIRKIGGVIVVFS

SEQ ID NO: 7205 - protein, 10 aa, synthetic construct
TRVSFGLHFM

SEQ ID NO: 7206 - protein, 11 aa, synthetic construct
TVYVQPCHRFI

SEQ ID NO: 7207 - protein, 10 aa, synthetic construct
VSLFRGMYFV

SEQ ID NO: 7208 - protein, 11 aa, synthetic construct
TGFDVILGAFT

SEQ ID NO: 7209 - protein, 8 aa, synthetic construct
TCINGSLS

SEQ ID NO: 7210 - protein, 8 aa, synthetic construct
TSLSNVVQ

SEQ ID NO: 7211 - protein, 10 aa, synthetic construct
TALYVGKGFV

SEQ ID NO: 7212 - protein, 9 aa, synthetic construct
TVINWPRFM

SEQ ID NO: 7213 - protein, 9 aa, synthetic construct
TSFVGYGFM

SEQ ID NO: 7214 - protein, 13 aa, synthetic construct
VCVTQDIARLRIN

SEQ ID NO: 7215 - protein, 9 aa, synthetic construct
TVFGSVFRM

SEQ ID NO: 7216 - protein, 13 aa, synthetic construct
TVFRTIELFVGKL

SEQ ID NO: 7217 - protein, 9 aa, synthetic construct
TCYWMHLFW

SEQ ID NO: 7218 - protein, 9 aa, synthetic construct
TRVTLYGFH

SEQ ID NO: 7219 - protein, 8 aa, synthetic construct
TVLRGRFF

SEQ ID NO: 7220 - protein, 9 aa, synthetic construct
ELVHMHDFD

SEQ ID NO: 7221 - protein, 9 aa, synthetic construct
TVITCGGVI

SEQ ID NO: 7222 - protein, 11 aa, synthetic construct
ISGYSGKAGTM

SEQ ID NO: 7223 - protein, 11 aa, synthetic construct
TVVSHRLMRII

SEQ ID NO: 7224 - protein, 9 aa, synthetic construct
TVLGRCGFV

SEQ ID NO: 7225 - protein, 11 aa, synthetic construct
VFIMRKIGVVV

SEQ ID NO: 7226 - protein, 7 aa, synthetic construct
FFHNDSL

SEQ ID NO: 7227 - protein, 8 aa, synthetic construct
VVLGRGFR

SEQ ID NO: 7228 - protein, 13 aa, synthetic construct
CLFVVHRNLGGFV

SEQ ID NO: 7229 - protein, 9 aa, synthetic construct
SVFTGVKLL

SEQ ID NO: 7230 - protein, 14 aa, synthetic construct
TNLRVSVDLCFIKV

SEQ ID NO: 7231 - protein, 9 aa, synthetic construct
VMFVTVAFV

SEQ ID NO: 7232 - protein, 9 aa, synthetic construct
TTMSTGGFT

SEQ ID NO: 7233 - protein, 11 aa, synthetic construct
TYIEIGTMSFL

SEQ ID NO: 7234 - protein, 8 aa, synthetic construct
AMCIGGSW

SEQ ID NO: 7235 - protein, 8 aa, synthetic construct
ERSHTLAG

SEQ ID NO: 7236 - protein, 8 aa, synthetic construct
ITLNGRFD

SEQ ID NO: 7237 - protein, 13 aa, synthetic construct
TGLDTTPRGFAFF

SEQ ID NO: 7238 - protein, 9 aa, synthetic construct
TCFATGAFL

SEQ ID NO: 7239 - protein, 9 aa, synthetic construct
TTYGQNSFM

SEQ ID NO: 7240 - protein, 8 aa, synthetic construct
TAWYLKFV

SEQ ID NO: 7241 - protein, 11 aa, synthetic construct
TLLSLGNYHFH

SEQ ID NO: 7242 - protein, 7 aa, synthetic construct
LQVERWC

SEQ ID NO: 7243 - protein, 10 aa, synthetic construct
TVIRRFGMLA

SEQ ID NO: 7244 - protein, 9 aa, synthetic construct
VNVDVCGFV

SEQ ID NO: 7245 - protein, 6 aa, synthetic construct
VDVNFE

SEQ ID NO: 7246 - protein, 8 aa, synthetic construct
TEVLTGFK

SEQ ID NO: 7247 - protein, 11 aa, synthetic construct
TAFDMVSSRFV

SEQ ID NO: 7248 - protein, 11 aa, synthetic construct
TSINISRIRFM

SEQ ID NO: 7249 - protein, 12 aa, synthetic construct
VGIIVAVTIRWV

SEQ ID NO: 7250 - protein, 10 aa, synthetic construct
LEVICIGLQF

SEQ ID NO: 7251 - protein, 11 aa, synthetic construct
TVVRWSQPLII

SEQ ID NO: 7252 - protein, 9 aa, synthetic construct
TFVRLGMFA

SEQ ID NO: 7253 - protein, 9 aa, synthetic construct
LNVDEVNDL

SEQ ID NO: 7254 - protein, 11 aa, synthetic construct
DPDSELRISPI

SEQ ID NO: 7255 - protein, 8 aa, synthetic construct
LSRRELFR

SEQ ID NO: 7256 - protein, 8 aa, synthetic construct
LRSVAEYL

SEQ ID NO: 7257 - protein, 10 aa, synthetic construct
VVFSHQMGFR

SEQ ID NO: 7258 - protein, 10 aa, synthetic construct
TSLVSLGYIV

SEQ ID NO: 7259 - protein, 9 aa, synthetic construct
TTVSDFCFK

SEQ ID NO: 7260 - protein, 9 aa, synthetic construct
LVCSRVRIR

SEQ ID NO: 7261 - protein, 8 aa, synthetic construct
TVLAGNFF

SEQ ID NO: 7262 - protein, 9 aa, synthetic construct
TSLVVRQFA

SEQ ID NO: 7263 - protein, 8 aa, synthetic construct
TVFDSGVQ

SEQ ID NO: 7264 - protein, 10 aa, synthetic construct
VLINKGLSFS

SEQ ID NO: 7265 - protein, 11 aa, synthetic construct
TNFLVNVWRIA

SEQ ID NO: 7266 - protein, 9 aa, synthetic construct
TVLAHMMFR

SEQ ID NO: 7267 - protein, 12 aa, synthetic construct
TGFGGGGQPFFV

SEQ ID NO: 7268 - protein, 11 aa, synthetic construct
IVSDGVAVATA

SEQ ID NO: 7269 - protein, 9 aa, synthetic construct
VTWHVTGFA

SEQ ID NO: 7270 - protein, 8 aa, synthetic construct
TTVDVVFR

SEQ ID NO: 7271 - protein, 10 aa, synthetic construct
TLVSITGRFR

SEQ ID NO: 7272 - protein, 10 aa, synthetic construct
TAIVIPFRLL

SEQ ID NO: 7273 - protein, 6 aa, synthetic construct
VTSRIR

SEQ ID NO: 7274 - protein, 8 aa, synthetic construct
VKFSAGFA

SEQ ID NO: 7275 - protein, 8 aa, synthetic construct
VKDVRSAL

SEQ ID NO: 7276 - protein, 9 aa, synthetic construct
TTIGARGIH

SEQ ID NO: 7277 - protein, 6 aa, synthetic construct
TTLFFR

SEQ ID NO: 7278 - protein, 10 aa, synthetic construct
VTVVRIVGFT

SEQ ID NO: 7279 - protein, 6 aa, synthetic construct
TTVGFD

SEQ ID NO: 7280 - protein, 10 aa, synthetic construct
TTFSFETGFL

SEQ ID NO: 7281 - protein, 6 aa, synthetic construct
TSFMFE

SEQ ID NO: 7282 - protein, 9 aa, synthetic construct
SLFGAEGLS

SEQ ID NO: 7283 - protein, 9 aa, synthetic construct
TFLRVFRLK

SEQ ID NO: 7284 - protein, 9 aa, synthetic construct
VIICAGPII

SEQ ID NO: 7285 - protein, 11 aa, synthetic construct
TLIIHHPVAFV

SEQ ID NO: 7286 - protein, 11 aa, synthetic construct
SGVNRVTRRYL

SEQ ID NO: 7287 - protein, 10 aa, synthetic construct
TFFALRVGFV

SEQ ID NO: 7288 - protein, 11 aa, synthetic construct
TTLVSIVMRFA

SEQ ID NO: 7289 - protein, 9 aa, synthetic construct
STLRDGGFR

SEQ ID NO: 7290 - protein, 10 aa, synthetic construct
VVVLCVHKFK

SEQ ID NO: 7291 - protein, 8 aa, synthetic construct
TVIHADVY

SEQ ID NO: 7292 - protein, 11 aa, synthetic construct
STTIVIGDVEP

SEQ ID NO: 7293 - protein, 9 aa, synthetic construct
TMIDSIFIW

SEQ ID NO: 7294 - protein, 10 aa, synthetic construct
TVFSGKAGVL

SEQ ID NO: 7295 - protein, 9 aa, synthetic construct
IRISSTGWF

SEQ ID NO: 7296 - protein, 9 aa, synthetic construct
TVINTFRVV

SEQ ID NO: 7297 - protein, 8 aa, synthetic construct
VTLMNGFT

SEQ ID NO: 7298 - protein, 9 aa, synthetic construct
TLWTVARFR

SEQ ID NO: 7299 - protein, 7 aa, synthetic construct
TMSRDFV

SEQ ID NO: 7300 - protein, 13 aa, synthetic construct
WTMAVDKYRTIIS

SEQ ID NO: 7301 - protein, 9 aa, synthetic construct
TSHIRHHFA

SEQ ID NO: 7302 - protein, 10 aa, synthetic construct
VVIGRDLRFL

SEQ ID NO: 7303 - protein, 8 aa, synthetic construct
CVFNSMFA

SEQ ID NO: 7304 - protein, 10 aa, synthetic construct
SVVVIGGRIE

SEQ ID NO: 7305 - protein, 8 aa, synthetic construct
CVVDRGFL

SEQ ID NO: 7306 - protein, 9 aa, synthetic construct
TVLGTRHLV

SEQ ID NO: 7307 - protein, 9 aa, synthetic construct
THLDVKGMQ

SEQ ID NO: 7308 - protein, 10 aa, synthetic construct
STLVTGTGIR

SEQ ID NO: 7309 - protein, 9 aa, synthetic construct
TCLIRGGFR

SEQ ID NO: 7310 - protein, 9 aa, synthetic construct
TFLEMYGFI

SEQ ID NO: 7311 - protein, 8 aa, synthetic construct
TYFTGMFE

SEQ ID NO: 7312 - protein, 8 aa, synthetic construct
TTCDSNVV

SEQ ID NO: 7313 - protein, 13 aa, synthetic construct
ERVPESQADIPCL

SEQ ID NO: 7314 - protein, 10 aa, synthetic construct
VIIGPTWRLL

SEQ ID NO: 7315 - protein, 9 aa, synthetic construct
TVTVAHYFD

SEQ ID NO: 7316 - protein, 9 aa, synthetic construct
TTFDDVNFR

SEQ ID NO: 7317 - protein, 9 aa, synthetic construct
STLLRRGLI

SEQ ID NO: 7318 - protein, 9 aa, synthetic construct
VIISRCEIM

SEQ ID NO: 7319 - protein, 10 aa, synthetic construct
CVFHTVNFFV

SEQ ID NO: 7320 - protein, 8 aa, synthetic construct
TMIELSFR

SEQ ID NO: 7321 - protein, 13 aa, synthetic construct
MRGIDESTLPMHF

SEQ ID NO: 7322 - protein, 10 aa, synthetic construct
TVLTEVSGFS

SEQ ID NO: 7323 - protein, 8 aa, synthetic construct
TALVMRFT

SEQ ID NO: 7324 - protein, 9 aa, synthetic construct
SCLGAFRFM

SEQ ID NO: 7325 - protein, 10 aa, synthetic construct
QHYNYDWNFG

SEQ ID NO: 7326 - protein, 6 aa, synthetic construct
VTCRIM

SEQ ID NO: 7327 - protein, 10 aa, synthetic construct
LIHNHVAPWQ

SEQ ID NO: 7328 - protein, 9 aa, synthetic construct
VVIVDNRFV

SEQ ID NO: 7329 - protein, 10 aa, synthetic construct
TVVSAMMSFV

SEQ ID NO: 7330 - protein, 10 aa, synthetic construct
TTIGNLGHPR

SEQ ID NO: 7331 - protein, 8 aa, synthetic construct
MHVGMGIN

SEQ ID NO: 7332 - protein, 8 aa, synthetic construct
LLLAGGWH

SEQ ID NO: 7333 - protein, 9 aa, synthetic construct
TAVMGHSIV

SEQ ID NO: 7334 - protein, 13 aa, synthetic construct
TIVIGPLMKAKIE

SEQ ID NO: 7335 - protein, 9 aa, synthetic construct
CALGINGKE

SEQ ID NO: 7336 - protein, 6 aa, synthetic construct
VSIRII

SEQ ID NO: 7337 - protein, 11 aa, synthetic construct
TSIHVFGHVFI

SEQ ID NO: 7338 - protein, 10 aa, synthetic construct
WAIIENINFV

SEQ ID NO: 7339 - protein, 11 aa, synthetic construct
TCWKTRAEKML

SEQ ID NO: 7340 - protein, 8 aa, synthetic construct
TALVIAKK

SEQ ID NO: 7341 - protein, 12 aa, synthetic construct
TVIHAGMYGGFG

SEQ ID NO: 7342 - protein, 8 aa, synthetic construct
KAFAHRFF

SEQ ID NO: 7343 - protein, 13 aa, synthetic construct
LASLMGITDWSGM

SEQ ID NO: 7344 - protein, 9 aa, synthetic construct
TAYRARHFH

SEQ ID NO: 7345 - protein, 13 aa, synthetic construct
TAIVVKVAVANIV

SEQ ID NO: 7346 - protein, 8 aa, synthetic construct
TVIDDKVR

SEQ ID NO: 7347 - protein, 12 aa, synthetic construct
IAVVPWLERVFM

SEQ ID NO: 7348 - protein, 10 aa, synthetic construct
VMLFSVMGFV

SEQ ID NO: 7349 - protein, 13 aa, synthetic construct
TVGHRMMRSLYIL

SEQ ID NO: 7350 - protein, 10 aa, synthetic construct
TVFTMVVMLK

SEQ ID NO: 7351 - protein, 12 aa, synthetic construct
VFIKLGRIHIFG

SEQ ID NO: 7352 - protein, 12 aa, synthetic construct
SPYGLTRGLIRQ

SEQ ID NO: 7353 - protein, 10 aa, synthetic construct
TTWGFEFNFM

SEQ ID NO: 7354 - protein, 8 aa, synthetic construct
TVWKTMFD

SEQ ID NO: 7355 - protein, 9 aa, synthetic construct
TTVNINGFK

SEQ ID NO: 7356 - protein, 12 aa, synthetic construct
TVVRLRDFGTFR

SEQ ID NO: 7357 - protein, 9 aa, synthetic construct
SGLQTSTII

SEQ ID NO: 7358 - protein, 7 aa, synthetic construct
ACVSHPR

SEQ ID NO: 7359 - protein, 8 aa, synthetic construct
ADGLSMVN

SEQ ID NO: 7360 - protein, 8 aa, synthetic construct
TVFDVLKV

SEQ ID NO: 7361 - protein, 6 aa, synthetic construct
ADTDIV

SEQ ID NO: 7362 - protein, 9 aa, synthetic construct
WTVHNTGFD

SEQ ID NO: 7363 - protein, 13 aa, synthetic construct
GPVMGCSTSVLYL

SEQ ID NO: 7364 - protein, 9 aa, synthetic construct
VGMTGAKFL

SEQ ID NO: 7365 - protein, 10 aa, synthetic construct
TTWSRNVGIE

SEQ ID NO: 7366 - protein, 9 aa, synthetic construct
SVVLVYRVL

SEQ ID NO: 7367 - protein, 12 aa, synthetic construct
LVFEQVGLGGFV

SEQ ID NO: 7368 - protein, 9 aa, synthetic construct
VLIICHMFI

SEQ ID NO: 7369 - protein, 8 aa, synthetic construct
TVFHIMFA

SEQ ID NO: 7370 - protein, 6 aa, synthetic construct
VNMRFE

SEQ ID NO: 7371 - protein, 10 aa, synthetic construct
VRISLEVGIV

SEQ ID NO: 7372 - protein, 9 aa, synthetic construct
TSLGWCGFE

SEQ ID NO: 7373 - protein, 11 aa, synthetic construct
TTLVTDRMVIA

SEQ ID NO: 7374 - protein, 14 aa, synthetic construct
SGFSMRPGVRLAKG

SEQ ID NO: 7375 - protein, 9 aa, synthetic construct
VTVSVGLFQ

SEQ ID NO: 7376 - protein, 9 aa, synthetic construct
TVFQLMRIT

SEQ ID NO: 7377 - protein, 8 aa, synthetic construct
VTFARRFV

SEQ ID NO: 7378 - protein, 9 aa, synthetic construct
TVVKGQSIA

SEQ ID NO: 7379 - protein, 9 aa, synthetic construct
TSVRSGAFM

SEQ ID NO: 7380 - protein, 8 aa, synthetic construct
WVVKGQVS

SEQ ID NO: 7381 - protein, 10 aa, synthetic construct
IVILAIVSFV

SEQ ID NO: 7382 - protein, 13 aa, synthetic construct
SFIKGINVGVRLE

SEQ ID NO: 7383 - protein, 11 aa, synthetic construct
VGISSLVRRFV

SEQ ID NO: 7384 - protein, 11 aa, synthetic construct
TSMVGFPVSIV

SEQ ID NO: 7385 - protein, 9 aa, synthetic construct
TVYDRRALR

SEQ ID NO: 7386 - protein, 10 aa, synthetic construct
IHVEGLAAVV

SEQ ID NO: 7387 - protein, 8 aa, synthetic construct
LVVNKLIM

SEQ ID NO: 7388 - protein, 9 aa, synthetic construct
LSVDGIKVV

SEQ ID NO: 7389 - protein, 9 aa, synthetic construct
VMIGNASFV

SEQ ID NO: 7390 - protein, 6 aa, synthetic construct
EIVREW

SEQ ID NO: 7391 - protein, 9 aa, synthetic construct
AVWLSRSFR

SEQ ID NO: 7392 - protein, 10 aa, synthetic construct
THMNVELLRR

SEQ ID NO: 7393 - protein, 9 aa, synthetic construct
TAHEGWMFH

SEQ ID NO: 7394 - protein, 10 aa, synthetic construct
VVHTHDLVFV

SEQ ID NO: 7395 - protein, 9 aa, synthetic construct
TVFREATFM

SEQ ID NO: 7396 - protein, 9 aa, synthetic construct
TMVRLSMFV

SEQ ID NO: 7397 - protein, 10 aa, synthetic construct
TGFSRTLSRG

SEQ ID NO: 7398 - protein, 8 aa, synthetic construct
TAIMGRFI

SEQ ID NO: 7399 - protein, 9 aa, synthetic construct
TYLTTGMFQ

SEQ ID NO: 7400 - protein, 6 aa, synthetic construct
GWCTPK

SEQ ID NO: 7401 - protein, 10 aa, synthetic construct
VCLGGLDFVG

SEQ ID NO: 7402 - protein, 10 aa, synthetic construct
SAITNALGLK

SEQ ID NO: 7403 - protein, 9 aa, synthetic construct
TRWGKDGFQ

SEQ ID NO: 7404 - protein, 9 aa, synthetic construct
TIFNRTGFL

SEQ ID NO: 7405 - protein, 8 aa, synthetic construct
SMSRDELF

SEQ ID NO: 7406 - protein, 9 aa, synthetic construct
TLVSDFAFV

SEQ ID NO: 7407 - protein, 10 aa, synthetic construct
TGVDAMGYIR

SEQ ID NO: 7408 - protein, 14 aa, synthetic construct
DTVSGGDAAWRSAW

SEQ ID NO: 7409 - protein, 9 aa, synthetic construct
TVVTRNSFK

SEQ ID NO: 7410 - protein, 9 aa, synthetic construct
TVVRALGFG

SEQ ID NO: 7411 - protein, 12 aa, synthetic construct
VVAPNFRHARFM

SEQ ID NO: 7412 - protein, 6 aa, synthetic construct
WDRLFM

SEQ ID NO: 7413 - protein, 8 aa, synthetic construct
TSCIVHFF

SEQ ID NO: 7414 - protein, 10 aa, synthetic construct
VALGGFCVFV

SEQ ID NO: 7415 - protein, 14 aa, synthetic construct
DYWTVFKVIIDSAS

SEQ ID NO: 7416 - protein, 12 aa, synthetic construct
TMLIKRNTVWIA

SEQ ID NO: 7417 - protein, 11 aa, synthetic construct
TTFETVRKCFV

SEQ ID NO: 7418 - protein, 10 aa, synthetic construct
TAVVGRVRFV

SEQ ID NO: 7419 - protein, 10 aa, synthetic construct
TMSDKVVGFR

SEQ ID NO: 7420 - protein, 9 aa, synthetic construct
TCVNMAGFV

SEQ ID NO: 7421 - protein, 13 aa, synthetic construct
CYVLQVTGKMMFT

SEQ ID NO: 7422 - protein, 9 aa, synthetic construct
VVFRMTVFN

SEQ ID NO: 7423 - protein, 10 aa, synthetic construct
TVIVAGVGFE

SEQ ID NO: 7424 - protein, 14 aa, synthetic construct
TKVVPEGPMRIRIA

SEQ ID NO: 7425 - protein, 11 aa, synthetic construct
VVIERNLPVFR

SEQ ID NO: 7426 - protein, 8 aa, synthetic construct
MCEERSAT

SEQ ID NO: 7427 - protein, 9 aa, synthetic construct
DTLGIGHSR

SEQ ID NO: 7428 - protein, 9 aa, synthetic construct
VVVTRNGFV

SEQ ID NO: 7429 - protein, 13 aa, synthetic construct
VDYIVVNGAGIFI

SEQ ID NO: 7430 - protein, 9 aa, synthetic construct
TGIARRQID

SEQ ID NO: 7431 - protein, 8 aa, synthetic construct
TCMGVTKS

SEQ ID NO: 7432 - protein, 8 aa, synthetic construct
TALDVKFR

SEQ ID NO: 7433 - protein, 10 aa, synthetic construct
SLLVNMGKLQ

SEQ ID NO: 7434 - protein, 8 aa, synthetic construct
TCLRDIFV

SEQ ID NO: 7435 - protein, 8 aa, synthetic construct
TLLTGVFV

SEQ ID NO: 7436 - protein, 9 aa, synthetic construct
TALGSISLV

SEQ ID NO: 7437 - protein, 9 aa, synthetic construct
LIITRNALQ

SEQ ID NO: 7438 - protein, 10 aa, synthetic construct
TIFSRSGGFQ

SEQ ID NO: 7439 - protein, 11 aa, synthetic construct
LGKSQVTGVWR

SEQ ID NO: 7440 - protein, 11 aa, synthetic construct
TTLELASPWFR

SEQ ID NO: 7441 - protein, 10 aa, synthetic construct
STLGGASRLS

SEQ ID NO: 7442 - protein, 11 aa, synthetic construct
FGKVLMTHGFE

SEQ ID NO: 7443 - protein, 10 aa, synthetic construct
TVVGYEIRVR

SEQ ID NO: 7444 - protein, 6 aa, synthetic construct
VGFLDR

SEQ ID NO: 7445 - protein, 8 aa, synthetic construct
TGIAVRFR

SEQ ID NO: 7446 - protein, 8 aa, synthetic construct
TVVGVRII

SEQ ID NO: 7447 - protein, 9 aa, synthetic construct
CIFGDHSFS

SEQ ID NO: 7448 - protein, 9 aa, synthetic construct
CVIDACYPK

SEQ ID NO: 7449 - protein, 8 aa, synthetic construct
TVLVRMFR

SEQ ID NO: 7450 - protein, 6 aa, synthetic construct
LTDRIR

SEQ ID NO: 7451 - protein, 10 aa, synthetic construct
VVVSKGGGFG

SEQ ID NO: 7452 - protein, 6 aa, synthetic construct
WTLGLC

SEQ ID NO: 7453 - protein, 8 aa, synthetic construct
VYFQIGKA

SEQ ID NO: 7454 - protein, 8 aa, synthetic construct
SVVMVDLK

SEQ ID NO: 7455 - protein, 13 aa, synthetic construct
TALIDSRDGIVVL

SEQ ID NO: 7456 - protein, 8 aa, synthetic construct
TAFVLMFH

SEQ ID NO: 7457 - protein, 10 aa, synthetic construct
TVHHKEGRFR

SEQ ID NO: 7458 - protein, 13 aa, synthetic construct
HDVDMVLDIGRVV

SEQ ID NO: 7459 - protein, 8 aa, synthetic construct
CYIVTRLV

SEQ ID NO: 7460 - protein, 9 aa, synthetic construct
TIVSTQGFA

SEQ ID NO: 7461 - protein, 10 aa, synthetic construct
TGYGAVDGFT

SEQ ID NO: 7462 - protein, 8 aa, synthetic construct
TGFRKLFV

SEQ ID NO: 7463 - protein, 10 aa, synthetic construct
TTFVPVVFFV

SEQ ID NO: 7464 - protein, 8 aa, synthetic construct
TRFNLLFI

SEQ ID NO: 7465 - protein, 9 aa, synthetic construct
VSFDVVTFR

SEQ ID NO: 7466 - protein, 10 aa, synthetic construct
SAFFALHYFV

SEQ ID NO: 7467 - protein, 9 aa, synthetic construct
TRHVSTGFK

SEQ ID NO: 7468 - protein, 13 aa, synthetic construct
LGTSVDVMAHDRM

SEQ ID NO: 7469 - protein, 8 aa, synthetic construct
AAFHIYFT

SEQ ID NO: 7470 - protein, 10 aa, synthetic construct
TVRDSIRGFL

SEQ ID NO: 7471 - protein, 8 aa, synthetic construct
FMRDPFGD

SEQ ID NO: 7472 - protein, 7 aa, synthetic construct
MEEDRMK

SEQ ID NO: 7473 - protein, 9 aa, synthetic construct
TALVSSVFV

SEQ ID NO: 7474 - protein, 9 aa, synthetic construct
TCLGAWKFD

SEQ ID NO: 7475 - protein, 10 aa, synthetic construct
VSVINSLAFL

SEQ ID NO: 7476 - protein, 9 aa, synthetic construct
VIVGPIFIR

SEQ ID NO: 7477 - protein, 14 aa, synthetic construct
TSLEVRNDIVVGVV

SEQ ID NO: 7478 - protein, 10 aa, synthetic construct
LGMPKHRVIK

SEQ ID NO: 7479 - protein, 9 aa, synthetic construct
TGIVGNSFA

SEQ ID NO: 7480 - protein, 13 aa, synthetic construct
TGLITARGVMIIR

SEQ ID NO: 7481 - protein, 9 aa, synthetic construct
TCFNSVLFI

SEQ ID NO: 7482 - protein, 9 aa, synthetic construct
TVVKMPSIT

SEQ ID NO: 7483 - protein, 9 aa, synthetic construct
VTVRLGLFK

SEQ ID NO: 7484 - protein, 14 aa, synthetic construct
RTILSRGSGRLRFE

SEQ ID NO: 7485 - protein, 8 aa, synthetic construct
AVSGIRFH

SEQ ID NO: 7486 - protein, 7 aa, synthetic construct
ADADRLT

SEQ ID NO: 7487 - protein, 10 aa, synthetic construct
LCVIQRVGWM

SEQ ID NO: 7488 - protein, 13 aa, synthetic construct
TAVGSVHGIWGVN

SEQ ID NO: 7489 - protein, 9 aa, synthetic construct
VRLVGHKFM

SEQ ID NO: 7490 - protein, 8 aa, synthetic construct
TIVATRVM

SEQ ID NO: 7491 - protein, 11 aa, synthetic construct
TVYVNKGPYFL

SEQ ID NO: 7492 - protein, 6 aa, synthetic construct
LSTRIV

SEQ ID NO: 7493 - protein, 9 aa, synthetic construct
TEAGNAGFM

SEQ ID NO: 7494 - protein, 11 aa, synthetic construct
TVFSSMQSGLT

SEQ ID NO: 7495 - protein, 11 aa, synthetic construct
TTLDLIRGLKF

SEQ ID NO: 7496 - protein, 10 aa, synthetic construct
SVYSDRWFFS

SEQ ID NO: 7497 - protein, 10 aa, synthetic construct
TLFTSAVFFV

SEQ ID NO: 7498 - protein, 8 aa, synthetic construct
TLFDMIVE

SEQ ID NO: 7499 - protein, 14 aa, synthetic construct
TIVELVDSGRMQFR

SEQ ID NO: 7500 - protein, 10 aa, synthetic construct
TILREGCGFD

SEQ ID NO: 7501 - protein, 9 aa, synthetic construct
SVLDQRGLV

SEQ ID NO: 7502 - protein, 9 aa, synthetic construct
SEMVYTGVV

SEQ ID NO: 7503 - protein, 9 aa, synthetic construct
TELGIGGFI

SEQ ID NO: 7504 - protein, 14 aa, synthetic construct
LDLVKGNGGIFKFG

SEQ ID NO: 7505 - protein, 13 aa, synthetic construct
TALSKDVHGLRFV

SEQ ID NO: 7506 - protein, 12 aa, synthetic construct
TVIGGATVFGFG

SEQ ID NO: 7507 - protein, 9 aa, synthetic construct
TAIRATSIA

SEQ ID NO: 7508 - protein, 8 aa, synthetic construct
TSFERIFR

SEQ ID NO: 7509 - protein, 8 aa, synthetic construct
WIVANGVA

SEQ ID NO: 7510 - protein, 9 aa, synthetic construct
LTFGVDVVI

SEQ ID NO: 7511 - protein, 8 aa, synthetic construct
TEFSGGFH

SEQ ID NO: 7512 - protein, 13 aa, synthetic construct
TEVRGNPVAIRFV

SEQ ID NO: 7513 - protein, 9 aa, synthetic construct
TGLLSQRFV

SEQ ID NO: 7514 - protein, 10 aa, synthetic construct
LAVNMSRAWC

SEQ ID NO: 7515 - protein, 9 aa, synthetic construct
GCVMDTDPD

SEQ ID NO: 7516 - protein, 10 aa, synthetic construct
TRVLHNGRVT

SEQ ID NO: 7517 - protein, 9 aa, synthetic construct
VLVVRGMFT

SEQ ID NO: 7518 - protein, 11 aa, synthetic construct
TAHVRVWVRFV

SEQ ID NO: 7519 - protein, 9 aa, synthetic construct
TRLLDDGID

SEQ ID NO: 7520 - protein, 8 aa, synthetic construct
SVFASRLF

SEQ ID NO: 7521 - protein, 9 aa, synthetic construct
TVVRAKRFQ

SEQ ID NO: 7522 - protein, 9 aa, synthetic construct
VMAAANRLD

SEQ ID NO: 7523 - protein, 10 aa, synthetic construct
TGVAADWGFV

SEQ ID NO: 7524 - protein, 14 aa, synthetic construct
SVVGLGVRDRGMIR

SEQ ID NO: 7525 - protein, 10 aa, synthetic construct
TTRCGLVGFV

SEQ ID NO: 7526 - protein, 13 aa, synthetic construct
TGMQLNPELTLFV

SEQ ID NO: 7527 - protein, 10 aa, synthetic construct
TSINDVGKLV

SEQ ID NO: 7528 - protein, 9 aa, synthetic construct
VRHVSRMFE

SEQ ID NO: 7529 - protein, 9 aa, synthetic construct
ACMGVVTFT

SEQ ID NO: 7530 - protein, 11 aa, synthetic construct
TGYAATLMRFM

SEQ ID NO: 7531 - protein, 7 aa, synthetic construct
LEVSKWV

SEQ ID NO: 7532 - protein, 10 aa, synthetic construct
VLWNALGMIC

SEQ ID NO: 7533 - protein, 6 aa, synthetic construct
TGLRVG

SEQ ID NO: 7534 - protein, 11 aa, synthetic construct
TEFIADEMKFL

SEQ ID NO: 7535 - protein, 10 aa, synthetic construct
LRELHGGDDS

SEQ ID NO: 7536 - protein, 11 aa, synthetic construct
TGLDLCESVFR

SEQ ID NO: 7537 - protein, 9 aa, synthetic construct
VQFETMVFV

SEQ ID NO: 7538 - protein, 11 aa, synthetic construct
MGFSQANCHRY

SEQ ID NO: 7539 - protein, 9 aa, synthetic construct
VTLGVWGFI

SEQ ID NO: 7540 - protein, 9 aa, synthetic construct
TTVGCFGFG

SEQ ID NO: 7541 - protein, 9 aa, synthetic construct
TLWMDTNLV

SEQ ID NO: 7542 - protein, 10 aa, synthetic construct
SVIGETGRLH

SEQ ID NO: 7543 - protein, 13 aa, synthetic construct
TYWNIAEINISFL

SEQ ID NO: 7544 - protein, 9 aa, synthetic construct
VEIKQLEFT

SEQ ID NO: 7545 - protein, 14 aa, synthetic construct
DGIDAVTLNPKRFA

SEQ ID NO: 7546 - protein, 12 aa, synthetic construct
VMLDCNGRKGFF

SEQ ID NO: 7547 - protein, 9 aa, synthetic construct
TALKLDRFI

SEQ ID NO: 7548 - protein, 10 aa, synthetic construct
TGVTSGWDFA

SEQ ID NO: 7549 - protein, 10 aa, synthetic construct
VVLSSDCRFM

SEQ ID NO: 7550 - protein, 9 aa, synthetic construct
TVLIAVGFF

SEQ ID NO: 7551 - protein, 9 aa, synthetic construct
TVLARMHFN

SEQ ID NO: 7552 - protein, 10 aa, synthetic construct
CRLIVGSGFV

SEQ ID NO: 7553 - protein, 11 aa, synthetic construct
ATCDLRNGRFQ

SEQ ID NO: 7554 - protein, 8 aa, synthetic construct
TAWNAGFV

SEQ ID NO: 7555 - protein, 9 aa, synthetic construct
TAMRNRLLV

SEQ ID NO: 7556 - protein, 9 aa, synthetic construct
VTLGRAQIA

SEQ ID NO: 7557 - protein, 9 aa, synthetic construct
TSIRTGFFV

SEQ ID NO: 7558 - protein, 9 aa, synthetic construct
VVLTRLMFV

SEQ ID NO: 7559 - protein, 11 aa, synthetic construct
LALLSDGFRIG

SEQ ID NO: 7560 - protein, 10 aa, synthetic construct
TVVVVGVGFG

SEQ ID NO: 7561 - protein, 9 aa, synthetic construct
TLITIMGFS

SEQ ID NO: 7562 - protein, 8 aa, synthetic construct
TVLSSVFR

SEQ ID NO: 7563 - protein, 10 aa, synthetic construct
KSVDFDSWGF

SEQ ID NO: 7564 - protein, 9 aa, synthetic construct
TSWRGYRFH

SEQ ID NO: 7565 - protein, 9 aa, synthetic construct
TAIVMGGVL

SEQ ID NO: 7566 - protein, 9 aa, synthetic construct
TSLLGSVFD

SEQ ID NO: 7567 - protein, 8 aa, synthetic construct
TIIRARVS

SEQ ID NO: 7568 - protein, 9 aa, synthetic construct
SGVQLGSIV

SEQ ID NO: 7569 - protein, 9 aa, synthetic construct
TDDLSTNGA

SEQ ID NO: 7570 - protein, 9 aa, synthetic construct
TAFNAMVFH

SEQ ID NO: 7571 - protein, 10 aa, synthetic construct
SSLGMHGRLL

SEQ ID NO: 7572 - protein, 9 aa, synthetic construct
TSYGNSMFV

SEQ ID NO: 7573 - protein, 10 aa, synthetic construct
VDLDVLGKFL

SEQ ID NO: 7574 - protein, 11 aa, synthetic construct
TSVDTSRRRFI

SEQ ID NO: 7575 - protein, 9 aa, synthetic construct
TALSFNGFE

SEQ ID NO: 7576 - protein, 4 aa, synthetic construct
IVVE

SEQ ID NO: 7577 - protein, 11 aa, synthetic construct
WGVLFITRLFQ

SEQ ID NO: 7578 - protein, 9 aa, synthetic construct
ISSGYRQFD

SEQ ID NO: 7579 - protein, 9 aa, synthetic construct
NLENESLSS

SEQ ID NO: 7580 - protein, 13 aa, synthetic construct
RGIVLKDNWAVWF

SEQ ID NO: 7581 - protein, 10 aa, synthetic construct
MEIMEGLRFM

SEQ ID NO: 7582 - protein, 10 aa, synthetic construct
VIWVIGVGFF

SEQ ID NO: 7583 - protein, 10 aa, synthetic construct
TTYLNRIGFG

SEQ ID NO: 7584 - protein, 12 aa, synthetic construct
SSWLGTFGLGFE

SEQ ID NO: 7585 - protein, 11 aa, synthetic construct
TVVALETRGFL

SEQ ID NO: 7586 - protein, 14 aa, synthetic construct
TVIIMGITRPMGFV

SEQ ID NO: 7587 - protein, 12 aa, synthetic construct
TVFIGSGDVRFV

SEQ ID NO: 7588 - protein, 7 aa, synthetic construct
IRLSRGT

SEQ ID NO: 7589 - protein, 10 aa, synthetic construct
TGLSSSRFFV

SEQ ID NO: 7590 - protein, 11 aa, synthetic construct
WVFRQLRMRFD

SEQ ID NO: 7591 - protein, 9 aa, synthetic construct
VMVVRMEFA

SEQ ID NO: 7592 - protein, 9 aa, synthetic construct
VMYNLTGLL

SEQ ID NO: 7593 - protein, 9 aa, synthetic construct
TVLTDHNFV

SEQ ID NO: 7594 - protein, 9 aa, synthetic construct
VVVGIGGLI

SEQ ID NO: 7595 - protein, 8 aa, synthetic construct
TVYDLGFR

SEQ ID NO: 7596 - protein, 9 aa, synthetic construct
TIVSNCIFD

SEQ ID NO: 7597 - protein, 10 aa, synthetic construct
LAMGSRRTWY

SEQ ID NO: 7598 - protein, 9 aa, synthetic construct
TLLERQRVL

SEQ ID NO: 7599 - protein, 10 aa, synthetic construct
LMVDGDMRFA

SEQ ID NO: 7600 - protein, 9 aa, synthetic construct
TVCHADGFD

SEQ ID NO: 7601 - protein, 10 aa, synthetic construct
TVYHDKFLIL

SEQ ID NO: 7602 - protein, 9 aa, synthetic construct
VIVNRHRIL

SEQ ID NO: 7603 - protein, 9 aa, synthetic construct
VTIDLSCFR

SEQ ID NO: 7604 - protein, 7 aa, synthetic construct
LDVVEWS

SEQ ID NO: 7605 - protein, 11 aa, synthetic construct
TQCLPASLQFS

SEQ ID NO: 7606 - protein, 7 aa, synthetic construct
MDEMQNR

SEQ ID NO: 7607 - protein, 6 aa, synthetic construct
FTKGFL

SEQ ID NO: 7608 - protein, 8 aa, synthetic construct
VAYTTSFV

SEQ ID NO: 7609 - protein, 11 aa, synthetic construct
MQTGSTLLGYG

SEQ ID NO: 7610 - protein, 10 aa, synthetic construct
TTFDRESGFM

SEQ ID NO: 7611 - protein, 9 aa, synthetic construct
TVFTGHRAS

SEQ ID NO: 7612 - protein, 13 aa, synthetic construct
TAYKRVCTVYSFL

SEQ ID NO: 7613 - protein, 9 aa, synthetic construct
SYLCAHRLV

SEQ ID NO: 7614 - protein, 6 aa, synthetic construct
WNVTFR

SEQ ID NO: 7615 - protein, 9 aa, synthetic construct
TGVGVYRFW

SEQ ID NO: 7616 - protein, 9 aa, synthetic construct
VMCQVGTFR

SEQ ID NO: 7617 - protein, 9 aa, synthetic construct
TTISAGRIY

SEQ ID NO: 7618 - protein, 9 aa, synthetic construct
VIAAVSRFD

SEQ ID NO: 7619 - protein, 11 aa, synthetic construct
VVISALTVGFR

SEQ ID NO: 7620 - protein, 7 aa, synthetic construct
DPANRND

SEQ ID NO: 7621 - protein, 9 aa, synthetic construct
VVVMSNMFS

SEQ ID NO: 7622 - protein, 13 aa, synthetic construct
FGLCAVDGRMSWW

SEQ ID NO: 7623 - protein, 8 aa, synthetic construct
TSLVHSFV

SEQ ID NO: 7624 - protein, 8 aa, synthetic construct
EVGTSAVR

SEQ ID NO: 7625 - protein, 14 aa, synthetic construct
DMSDSVFSADGMNG

SEQ ID NO: 7626 - protein, 8 aa, synthetic construct
TTMTETFV

SEQ ID NO: 7627 - protein, 9 aa, synthetic construct
TVYGSVGFR

SEQ ID NO: 7628 - protein, 11 aa, synthetic construct
VKLRIQAMSFV

SEQ ID NO: 7629 - protein, 9 aa, synthetic construct
TVVDWMSFK

SEQ ID NO: 7630 - protein, 8 aa, synthetic construct
SVIKNGLV

SEQ ID NO: 7631 - protein, 7 aa, synthetic construct
TCLWSFS

SEQ ID NO: 7632 - protein, 10 aa, synthetic construct
ICKLSTGRWN

SEQ ID NO: 7633 - protein, 9 aa, synthetic construct
CTVVLWGFQ

SEQ ID NO: 7634 - protein, 8 aa, synthetic construct
VLFQDRFI

SEQ ID NO: 7635 - protein, 10 aa, synthetic construct
VVWSCDGRIV

SEQ ID NO: 7636 - protein, 9 aa, synthetic construct
WGVSNGLFM

SEQ ID NO: 7637 - protein, 9 aa, synthetic construct
TAVSRGNIR

SEQ ID NO: 7638 - protein, 9 aa, synthetic construct
TSFMGVVRV

SEQ ID NO: 7639 - protein, 14 aa, synthetic construct
LGFTNSKKDGLLVV

SEQ ID NO: 7640 - protein, 9 aa, synthetic construct
MLVTSGLIV

SEQ ID NO: 7641 - protein, 6 aa, synthetic construct
LTDRII

SEQ ID NO: 7642 - protein, 8 aa, synthetic construct
TAWERVFN

SEQ ID NO: 7643 - protein, 10 aa, synthetic construct
VVLHVLYGFV

SEQ ID NO: 7644 - protein, 14 aa, synthetic construct
TALGSSAGVQVAFR

SEQ ID NO: 7645 - protein, 9 aa, synthetic construct
DSMVRGRYM

SEQ ID NO: 7646 - protein, 10 aa, synthetic construct
VFYIPFRWFV

SEQ ID NO: 7647 - protein, 7 aa, synthetic construct
IAVQPIM

SEQ ID NO: 7648 - protein, 8 aa, synthetic construct
TVIKTVIS

SEQ ID NO: 7649 - protein, 9 aa, synthetic construct
TGFNGRFFD

SEQ ID NO: 7650 - protein, 9 aa, synthetic construct
TNLGRNGLK

SEQ ID NO: 7651 - protein, 8 aa, synthetic construct
LIVWGSWA

SEQ ID NO: 7652 - protein, 9 aa, synthetic construct
SVFVYVRLK

SEQ ID NO: 7653 - protein, 8 aa, synthetic construct
TMAVPFGR

SEQ ID NO: 7654 - protein, 9 aa, synthetic construct
LLVADRGFN

SEQ ID NO: 7655 - protein, 9 aa, synthetic construct
TCFDGMTKS

SEQ ID NO: 7656 - protein, 10 aa, synthetic construct
VVVTKARGFS

SEQ ID NO: 7657 - protein, 8 aa, synthetic construct
WLYTSGFE

SEQ ID NO: 7658 - protein, 9 aa, synthetic construct
TGFDPNLMV

SEQ ID NO: 7659 - protein, 8 aa, synthetic construct
TTFREVFN

SEQ ID NO: 7660 - protein, 13 aa, synthetic construct
TIVYHCALNGWFR

SEQ ID NO: 7661 - protein, 10 aa, synthetic construct
LSVQRVNGFR

SEQ ID NO: 7662 - protein, 9 aa, synthetic construct
VVVGNALFR

SEQ ID NO: 7663 - protein, 6 aa, synthetic construct
WNVRFK

SEQ ID NO: 7664 - protein, 9 aa, synthetic construct
TGFGRGKFI

SEQ ID NO: 7665 - protein, 8 aa, synthetic construct
TVLLRSFW

SEQ ID NO: 7666 - protein, 9 aa, synthetic construct
VRVGPCCFT

SEQ ID NO: 7667 - protein, 8 aa, synthetic construct
ISVKKGFY

SEQ ID NO: 7668 - protein, 9 aa, synthetic construct
TFWRAGNFE

SEQ ID NO: 7669 - protein, 10 aa, synthetic construct
VGLDTHIGFV

SEQ ID NO: 7670 - protein, 9 aa, synthetic construct
TAFRSERFS

SEQ ID NO: 7671 - protein, 8 aa, synthetic construct
VIWISGFA

SEQ ID NO: 7672 - protein, 11 aa, synthetic construct
SGFDPNGGLKV

SEQ ID NO: 7673 - protein, 10 aa, synthetic construct
ASFTVLGGIV

SEQ ID NO: 7674 - protein, 13 aa, synthetic construct
WFVDLHIDGIKLN

SEQ ID NO: 7675 - protein, 11 aa, synthetic construct
TVVDSINLFFI

SEQ ID NO: 7676 - protein, 13 aa, synthetic construct
LTESREVGYVLWH

SEQ ID NO: 7677 - protein, 8 aa, synthetic construct
TALDRTFA

SEQ ID NO: 7678 - protein, 7 aa, synthetic construct
LVWTRWI

SEQ ID NO: 7679 - protein, 9 aa, synthetic construct
VTLAAVKFQ

SEQ ID NO: 7680 - protein, 9 aa, synthetic construct
LMCSGGRFV

SEQ ID NO: 7681 - protein, 9 aa, synthetic construct
TVFKRKVIE

SEQ ID NO: 7682 - protein, 9 aa, synthetic construct
SGLTNRGFA

SEQ ID NO: 7683 - protein, 13 aa, synthetic construct
TKVGIASGVMHIV

SEQ ID NO: 7684 - protein, 9 aa, synthetic construct
LRHGPGLWM

SEQ ID NO: 7685 - protein, 13 aa, synthetic construct
LMIGDGRIGTSII

SEQ ID NO: 7686 - protein, 12 aa, synthetic construct
IRENSDLNVRRD

SEQ ID NO: 7687 - protein, 9 aa, synthetic construct
TVFADVRFV

SEQ ID NO: 7688 - protein, 9 aa, synthetic construct
TMVQTISIS

SEQ ID NO: 7689 - protein, 9 aa, synthetic construct
TRVSLQGFV

SEQ ID NO: 7690 - protein, 8 aa, synthetic construct
TAITGGVV

SEQ ID NO: 7691 - protein, 10 aa, synthetic construct
VRYSVSRFFE

SEQ ID NO: 7692 - protein, 10 aa, synthetic construct
RVVRVLVVFG

SEQ ID NO: 7693 - protein, 8 aa, synthetic construct
TVIDHRVL

SEQ ID NO: 7694 - protein, 10 aa, synthetic construct
IQWNVKDGRR

SEQ ID NO: 7695 - protein, 10 aa, synthetic construct
VTLMKNGTII

SEQ ID NO: 7696 - protein, 10 aa, synthetic construct
TGIRNGFRFM

SEQ ID NO: 7697 - protein, 9 aa, synthetic construct
TECDYAGVK

SEQ ID NO: 7698 - protein, 10 aa, synthetic construct
SMFRSDIGLV

SEQ ID NO: 7699 - protein, 10 aa, synthetic construct
LYIEDKGGIV

SEQ ID NO: 7700 - protein, 10 aa, synthetic construct
MPALMQTGDD

SEQ ID NO: 7701 - protein, 9 aa, synthetic construct
TKFTIYYFS

SEQ ID NO: 7702 - protein, 6 aa, synthetic construct
TDTVFN

SEQ ID NO: 7703 - protein, 9 aa, synthetic construct
TVHRAGGFV

SEQ ID NO: 7704 - protein, 11 aa, synthetic construct
TVVKDVAPFIV

SEQ ID NO: 7705 - protein, 8 aa, synthetic construct
TVWQVQFA

SEQ ID NO: 7706 - protein, 10 aa, synthetic construct
TYLTALILFG

SEQ ID NO: 7707 - protein, 10 aa, synthetic construct
TGLMGSVGFI

SEQ ID NO: 7708 - protein, 7 aa, synthetic construct
RKLRWDM

SEQ ID NO: 7709 - protein, 9 aa, synthetic construct
SVLGARSVD

SEQ ID NO: 7710 - protein, 9 aa, synthetic construct
TRRQGHGFR

SEQ ID NO: 7711 - protein, 8 aa, synthetic construct
TALTGYFR

SEQ ID NO: 7712 - protein, 9 aa, synthetic construct
TLMARGHFS

SEQ ID NO: 7713 - protein, 9 aa, synthetic construct
SVWGVGVFY

SEQ ID NO: 7714 - protein, 9 aa, synthetic construct
VTMLARRIR

SEQ ID NO: 7715 - protein, 12 aa, synthetic construct
VAFRSRNGMAFM

SEQ ID NO: 7716 - protein, 10 aa, synthetic construct
VTFDLVNLFT

SEQ ID NO: 7717 - protein, 6 aa, synthetic construct
WTRLFE

SEQ ID NO: 7718 - protein, 9 aa, synthetic construct
VSVTIHGFD

SEQ ID NO: 7719 - protein, 13 aa, synthetic construct
TVFSIRTNDNGKL

SEQ ID NO: 7720 - protein, 10 aa, synthetic construct
VFLPRVVMCV

SEQ ID NO: 7721 - protein, 9 aa, synthetic construct
VLVYRGRFR

SEQ ID NO: 7722 - protein, 6 aa, synthetic construct
TNFTFC

SEQ ID NO: 7723 - protein, 9 aa, synthetic construct
TMVVVRGFV

SEQ ID NO: 7724 - protein, 10 aa, synthetic construct
IGVLNTGRFI

SEQ ID NO: 7725 - protein, 11 aa, synthetic construct
VDYVGTLGGFT

SEQ ID NO: 7726 - protein, 9 aa, synthetic construct
WLMKEVTFV

SEQ ID NO: 7727 - protein, 9 aa, synthetic construct
IDTWVSGRD

SEQ ID NO: 7728 - protein, 9 aa, synthetic construct
TYFSNVVFV

SEQ ID NO: 7729 - protein, 9 aa, synthetic construct
TQMDGGRFN

SEQ ID NO: 7730 - protein, 13 aa, synthetic construct
VWWGWVPNYHGFL

SEQ ID NO: 7731 - protein, 8 aa, synthetic construct
INDNPMLV

SEQ ID NO: 7732 - protein, 10 aa, synthetic construct
LDASNAINGG

SEQ ID NO: 7733 - protein, 6 aa, synthetic construct
LKADWA

SEQ ID NO: 7734 - protein, 9 aa, synthetic construct
SVYTKDRLG

SEQ ID NO: 7735 - protein, 9 aa, synthetic construct
TGISVNKFS

SEQ ID NO: 7736 - protein, 9 aa, synthetic construct
VIVVQGTFV

SEQ ID NO: 7737 - protein, 6 aa, synthetic construct
FTFALV

SEQ ID NO: 7738 - protein, 9 aa, synthetic construct
TGLDASGKV

SEQ ID NO: 7739 - protein, 9 aa, synthetic construct
TSLQDGFFR

SEQ ID NO: 7740 - protein, 9 aa, synthetic construct
VLAVTNGFA

SEQ ID NO: 7741 - protein, 14 aa, synthetic construct
TIVELVGSGRMQFR

SEQ ID NO: 7742 - protein, 9 aa, synthetic construct
TVVHASGIE

SEQ ID NO: 7743 - protein, 8 aa, synthetic construct
TMFDVVFA

SEQ ID NO: 7744 - protein, 10 aa, synthetic construct
VSVVQKIAFF

SEQ ID NO: 7745 - protein, 13 aa, synthetic construct
TLLKDVNGRCKVT

SEQ ID NO: 7746 - protein, 9 aa, synthetic construct
TTVTCCAFL

SEQ ID NO: 7747 - protein, 9 aa, synthetic construct
TVWMSQGFM

SEQ ID NO: 7748 - protein, 8 aa, synthetic construct
VVVDDKFM

SEQ ID NO: 7749 - protein, 9 aa, synthetic construct
TVIMSFCFN

SEQ ID NO: 7750 - protein, 9 aa, synthetic construct
TCKSGYRFW

SEQ ID NO: 7751 - protein, 10 aa, synthetic construct
TSVGRAMGIK

SEQ ID NO: 7752 - protein, 10 aa, synthetic construct
VAWSETIGIL

SEQ ID NO: 7753 - protein, 9 aa, synthetic construct
TIFVEGTFG

SEQ ID NO: 7754 - protein, 10 aa, synthetic construct
TSWAREREVR

SEQ ID NO: 7755 - protein, 11 aa, synthetic construct
TLYCDEKREID

SEQ ID NO: 7756 - protein, 8 aa, synthetic construct
CALHLTFV

SEQ ID NO: 7757 - protein, 10 aa, synthetic construct
TAISVNWGIR

SEQ ID NO: 7758 - protein, 9 aa, synthetic construct
TGVGVRMFI

SEQ ID NO: 7759 - protein, 10 aa, synthetic construct
LAKPVVGLWQ

SEQ ID NO: 7760 - protein, 13 aa, synthetic construct
TGVTKGYGAFGIK

SEQ ID NO: 7761 - protein, 9 aa, synthetic construct
TRVQTNRFI

SEQ ID NO: 7762 - protein, 9 aa, synthetic construct
GTIGDGGIT

SEQ ID NO: 7763 - protein, 9 aa, synthetic construct
LVFNEGTFS

SEQ ID NO: 7764 - protein, 9 aa, synthetic construct
TCVVANRFL

SEQ ID NO: 7765 - protein, 9 aa, synthetic construct
TSVHANRFV

SEQ ID NO: 7766 - protein, 8 aa, synthetic construct
AMYVGGFV

SEQ ID NO: 7767 - protein, 10 aa, synthetic construct
TLWGARMGFF

SEQ ID NO: 7768 - protein, 9 aa, synthetic construct
TRFDRSVFR

SEQ ID NO: 7769 - protein, 9 aa, synthetic construct
VMRVNSGFL

SEQ ID NO: 7770 - protein, 9 aa, synthetic construct
STFGHYMLK

SEQ ID NO: 7771 - protein, 8 aa, synthetic construct
VRFLDKLV

SEQ ID NO: 7772 - protein, 8 aa, synthetic construct
TVFIGAFR

SEQ ID NO: 7773 - protein, 11 aa, synthetic construct
VGVVFVTGRFE

SEQ ID NO: 7774 - protein, 11 aa, synthetic construct
IWVAKRAGTFR

SEQ ID NO: 7775 - protein, 8 aa, synthetic construct
VWIMDVFR

SEQ ID NO: 7776 - protein, 9 aa, synthetic construct
TTLGTGTFC

SEQ ID NO: 7777 - protein, 10 aa, synthetic construct
MGFRIEVGLR

SEQ ID NO: 7778 - protein, 9 aa, synthetic construct
TSLKGGRVV

SEQ ID NO: 7779 - protein, 10 aa, synthetic construct
TLYIRGMGFN

SEQ ID NO: 7780 - protein, 9 aa, synthetic construct
VTMIAVGFM

SEQ ID NO: 7781 - protein, 11 aa, synthetic construct
VTVCPVHWTFG

SEQ ID NO: 7782 - protein, 11 aa, synthetic construct
TMKLSQHPYFV

SEQ ID NO: 7783 - protein, 6 aa, synthetic construct
TTVGFR

SEQ ID NO: 7784 - protein, 9 aa, synthetic construct
AVWHQFCFQ

SEQ ID NO: 7785 - protein, 10 aa, synthetic construct
TVYAVGVGFK

SEQ ID NO: 7786 - protein, 8 aa, synthetic construct
IIRRHVNV

SEQ ID NO: 7787 - protein, 10 aa, synthetic construct
TTFSVSLGFP

SEQ ID NO: 7788 - protein, 9 aa, synthetic construct
TSFTLAGKI

SEQ ID NO: 7789 - protein, 10 aa, synthetic construct
TSWDRVAYFR

SEQ ID NO: 7790 - protein, 9 aa, synthetic construct
LGDLILTGR

SEQ ID NO: 7791 - protein, 8 aa, synthetic construct
VWVMVFHA

SEQ ID NO: 7792 - protein, 9 aa, synthetic construct
TYVRVGGFA

SEQ ID NO: 7793 - protein, 9 aa, synthetic construct
VLFGSGEFR

SEQ ID NO: 7794 - protein, 9 aa, synthetic construct
SCFDSGRVA

SEQ ID NO: 7795 - protein, 9 aa, synthetic construct
TLWDMIRFS

SEQ ID NO: 7796 - protein, 11 aa, synthetic construct
TVILYAAVMFA

SEQ ID NO: 7797 - protein, 9 aa, synthetic construct
VVHAFSMFT

SEQ ID NO: 7798 - protein, 9 aa, synthetic construct
TRLDSMRFI

SEQ ID NO: 7799 - protein, 10 aa, synthetic construct
TSMIWNKGVM

SEQ ID NO: 7800 - protein, 9 aa, synthetic construct
TIFDVGHFD

SEQ ID NO: 7801 - protein, 9 aa, synthetic construct
CVLVPTAFR

SEQ ID NO: 7802 - protein, 11 aa, synthetic construct
TTVNGFIGRFV

SEQ ID NO: 7803 - protein, 10 aa, synthetic construct
TGLRETWQFD

SEQ ID NO: 7804 - protein, 8 aa, synthetic construct
RMATNFAD

SEQ ID NO: 7805 - protein, 8 aa, synthetic construct
TVYKGGFR

SEQ ID NO: 7806 - protein, 10 aa, synthetic construct
TCLNIIGRVR

SEQ ID NO: 7807 - protein, 13 aa, synthetic construct
TGVGLVGSRVIVM

SEQ ID NO: 7808 - protein, 8 aa, synthetic construct
TGLSEGFR

SEQ ID NO: 7809 - protein, 8 aa, synthetic construct
TTIRIRFL

SEQ ID NO: 7810 - protein, 8 aa, synthetic construct
TTYFQMFH

SEQ ID NO: 7811 - protein, 10 aa, synthetic construct
LEVMPVGRRD

SEQ ID NO: 7812 - protein, 11 aa, synthetic construct
TIVGSNRPGFE

SEQ ID NO: 7813 - protein, 10 aa, synthetic construct
TVIVRMAGFV

SEQ ID NO: 7814 - protein, 9 aa, synthetic construct
VSLGKQGFL

SEQ ID NO: 7815 - protein, 9 aa, synthetic construct
TVFWMIRLM

SEQ ID NO: 7816 - protein, 13 aa, synthetic construct
VLWKVASMDKGFK

SEQ ID NO: 7817 - protein, 11 aa, synthetic construct
SMIAVADKRFR

SEQ ID NO: 7818 - protein, 9 aa, synthetic construct
GAASTDVWQ

SEQ ID NO: 7819 - protein, 8 aa, synthetic construct
IAFNYVFY

SEQ ID NO: 7820 - protein, 9 aa, synthetic construct
TVFVGVRFV

SEQ ID NO: 7821 - protein, 9 aa, synthetic construct
TIISGFGIL

SEQ ID NO: 7822 - protein, 13 aa, synthetic construct
SNLILRNGLLMVV

SEQ ID NO: 7823 - protein, 11 aa, synthetic construct
TLVNSKFLTFK

SEQ ID NO: 7824 - protein, 9 aa, synthetic construct
TTWDQRKFV

SEQ ID NO: 7825 - protein, 8 aa, synthetic construct
TSLKCGKR

SEQ ID NO: 7826 - protein, 10 aa, synthetic construct
SMLTTFALFT

SEQ ID NO: 7827 - protein, 9 aa, synthetic construct
LTVAGFRIV

SEQ ID NO: 7828 - protein, 6 aa, synthetic construct
TTVTFA

SEQ ID NO: 7829 - protein, 10 aa, synthetic construct
TILVDVMGFK

SEQ ID NO: 7830 - protein, 11 aa, synthetic construct
TLLSFRRRRIR

SEQ ID NO: 7831 - protein, 10 aa, synthetic construct
TSIVHGKGFL

SEQ ID NO: 7832 - protein, 9 aa, synthetic construct
TSLVLCRVV

SEQ ID NO: 7833 - protein, 9 aa, synthetic construct
LSGAQVQRA

SEQ ID NO: 7834 - protein, 9 aa, synthetic construct
VEFNFGMYR

SEQ ID NO: 7835 - protein, 9 aa, synthetic construct
TAIGRRRVG

SEQ ID NO: 7836 - protein, 8 aa, synthetic construct
SVWDRMVN

SEQ ID NO: 7837 - protein, 14 aa, synthetic construct
VAYILVANLVLNFV

SEQ ID NO: 7838 - protein, 8 aa, synthetic construct
CCIKHGVV

SEQ ID NO: 7839 - protein, 8 aa, synthetic construct
TQIMVHVV

SEQ ID NO: 7840 - protein, 10 aa, synthetic construct
TVFWAQIGFK

SEQ ID NO: 7841 - protein, 12 aa, synthetic construct
TGFVNGAMPHFQ

SEQ ID NO: 7842 - protein, 9 aa, synthetic construct
TIWTRESFS

SEQ ID NO: 7843 - protein, 8 aa, synthetic construct
TPREFWNG

SEQ ID NO: 7844 - protein, 9 aa, synthetic construct
SALMHHRIT

SEQ ID NO: 7845 - protein, 13 aa, synthetic construct
THMMFVLGTISAN

SEQ ID NO: 7846 - protein, 10 aa, synthetic construct
VLLVMSKGFK

SEQ ID NO: 7847 - protein, 9 aa, synthetic construct
TSFNRVAFI

SEQ ID NO: 7848 - protein, 14 aa, synthetic construct
TCVVSNEVSGVRFR

SEQ ID NO: 7849 - protein, 8 aa, synthetic construct
CCWVSTFH

SEQ ID NO: 7850 - protein, 13 aa, synthetic construct
EVIRVDMRRFRFE

SEQ ID NO: 7851 - protein, 9 aa, synthetic construct
ALFTGSRLM

SEQ ID NO: 7852 - protein, 9 aa, synthetic construct
TAFETYGFH

SEQ ID NO: 7853 - protein, 9 aa, synthetic construct
TVEYLLWNA

SEQ ID NO: 7854 - protein, 6 aa, synthetic construct
ESPEPN

SEQ ID NO: 7855 - protein, 9 aa, synthetic construct
SVLGASRLT

SEQ ID NO: 7856 - protein, 9 aa, synthetic construct
WIVGDGRFQ

SEQ ID NO: 7857 - protein, 8 aa, synthetic construct
TILRHRFL

SEQ ID NO: 7858 - protein, 9 aa, synthetic construct
TAVVEHSFR

SEQ ID NO: 7859 - protein, 9 aa, synthetic construct
TTFREDWFH

SEQ ID NO: 7860 - protein, 8 aa, synthetic construct
LMMYVWDC

SEQ ID NO: 7861 - protein, 9 aa, synthetic construct
TIMNGDRFV

SEQ ID NO: 7862 - protein, 9 aa, synthetic construct
SAWTDLNFL

SEQ ID NO: 7863 - protein, 10 aa, synthetic construct
TCLSKEFGIE

SEQ ID NO: 7864 - protein, 9 aa, synthetic construct
TMVAENRLL

SEQ ID NO: 7865 - protein, 9 aa, synthetic construct
TCFAIRKFL

SEQ ID NO: 7866 - protein, 9 aa, synthetic construct
VNVDRLGLT

SEQ ID NO: 7867 - protein, 10 aa, synthetic construct
THLTQHLRFV

SEQ ID NO: 7868 - protein, 10 aa, synthetic construct
SQFAAWSLLQ

SEQ ID NO: 7869 - protein, 10 aa, synthetic construct
AGIVGGLKMI

SEQ ID NO: 7870 - protein, 9 aa, synthetic construct
TMYGVGSFV

SEQ ID NO: 7871 - protein, 9 aa, synthetic construct
TAIGVRSFD

SEQ ID NO: 7872 - protein, 9 aa, synthetic construct
VVVDGRFLV

SEQ ID NO: 7873 - protein, 10 aa, synthetic construct
TWLSPGMVFL

SEQ ID NO: 7874 - protein, 9 aa, synthetic construct
TALMARLIV

SEQ ID NO: 7875 - protein, 9 aa, synthetic construct
TTWLDCSVR

SEQ ID NO: 7876 - protein, 10 aa, synthetic construct
TVLLIPGGFT

SEQ ID NO: 7877 - protein, 9 aa, synthetic construct
TGIGPHQFR

SEQ ID NO: 7878 - protein, 9 aa, synthetic construct
TRFDSHMFV

SEQ ID NO: 7879 - protein, 9 aa, synthetic construct
TVFRYGRFM

SEQ ID NO: 7880 - protein, 12 aa, synthetic construct
TYVIDNGGIKFV

SEQ ID NO: 7881 - protein, 9 aa, synthetic construct
TTLGNMIFF

SEQ ID NO: 7882 - protein, 14 aa, synthetic construct
SVWIHDGMHTFGFG

SEQ ID NO: 7883 - protein, 9 aa, synthetic construct
TICATGGWR

SEQ ID NO: 7884 - protein, 12 aa, synthetic construct
MDGLINRQQKFV

SEQ ID NO: 7885 - protein, 13 aa, synthetic construct
VEVGKHAKSVSFN

SEQ ID NO: 7886 - protein, 8 aa, synthetic construct
TSWTGMFF

SEQ ID NO: 7887 - protein, 9 aa, synthetic construct
WLVTRDGFQ

SEQ ID NO: 7888 - protein, 7 aa, synthetic construct
WAARPLH

SEQ ID NO: 7889 - protein, 9 aa, synthetic construct
TKLGISGFF

SEQ ID NO: 7890 - protein, 10 aa, synthetic construct
SYWPRQHSGN

SEQ ID NO: 7891 - protein, 10 aa, synthetic construct
TQNEVFSIRG

SEQ ID NO: 7892 - protein, 6 aa, synthetic construct
TSQLFD

SEQ ID NO: 7893 - protein, 8 aa, synthetic construct
VVIEHTFR

SEQ ID NO: 7894 - protein, 10 aa, synthetic construct
TVLNRQCEFH

SEQ ID NO: 7895 - protein, 9 aa, synthetic construct
TLFVGSRFS

SEQ ID NO: 7896 - protein, 9 aa, synthetic construct
TAIRPQSFR

SEQ ID NO: 7897 - protein, 10 aa, synthetic construct
KVASDMWDAE

SEQ ID NO: 7898 - protein, 13 aa, synthetic construct
TYFRHATGDVVFA

SEQ ID NO: 7899 - protein, 10 aa, synthetic construct
TCLGTNGGFE

SEQ ID NO: 7900 - protein, 8 aa, synthetic construct
VVIWDGFA

SEQ ID NO: 7901 - protein, 7 aa, synthetic construct
DKEEGVD

SEQ ID NO: 7902 - protein, 10 aa, synthetic construct
TDLNHQLMFV

SEQ ID NO: 7903 - protein, 11 aa, synthetic construct
TLVNWDTLNFY

SEQ ID NO: 7904 - protein, 9 aa, synthetic construct
VAMGDNRIL

SEQ ID NO: 7905 - protein, 10 aa, synthetic construct
TTWSWLAGFR

SEQ ID NO: 7906 - protein, 9 aa, synthetic construct
TSFAVGSLW

SEQ ID NO: 7907 - protein, 9 aa, synthetic construct
TSIIHKKFV

SEQ ID NO: 7908 - protein, 9 aa, synthetic construct
TVLVPDGFQ

SEQ ID NO: 7909 - protein, 9 aa, synthetic construct
VKIVDCQFV

SEQ ID NO: 7910 - protein, 9 aa, synthetic construct
VAVNDNRIC

SEQ ID NO: 7911 - protein, 8 aa, synthetic construct
TVFYHGFK

SEQ ID NO: 7912 - protein, 9 aa, synthetic construct
VQYTNMRFD

SEQ ID NO: 7913 - protein, 11 aa, synthetic construct
VTLLSRVPYVM

SEQ ID NO: 7914 - protein, 9 aa, synthetic construct
IVVRDCNFV

SEQ ID NO: 7915 - protein, 9 aa, synthetic construct
VMVLNSMIQ

SEQ ID NO: 7916 - protein, 8 aa, synthetic construct
VIVDNDIR

SEQ ID NO: 7917 - protein, 9 aa, synthetic construct
TGLTDAGFY

SEQ ID NO: 7918 - protein, 9 aa, synthetic construct
TAVVLGGFR

SEQ ID NO: 7919 - protein, 12 aa, synthetic construct
TLMVLGTGSCFT

SEQ ID NO: 7920 - protein, 10 aa, synthetic construct
TRYLVGYGFV

SEQ ID NO: 7921 - protein, 8 aa, synthetic construct
TELADRFK

SEQ ID NO: 7922 - protein, 10 aa, synthetic construct
TQIGANGIFR

SEQ ID NO: 7923 - protein, 11 aa, synthetic construct
QVVWPRLCWGE

SEQ ID NO: 7924 - protein, 8 aa, synthetic construct
LVVDWVWR

SEQ ID NO: 7925 - protein, 8 aa, synthetic construct
TALKRVFQ

SEQ ID NO: 7926 - protein, 10 aa, synthetic construct
SMVMRRGGLM

SEQ ID NO: 7927 - protein, 14 aa, synthetic construct
TLWHHHSRYGFRFT

SEQ ID NO: 7928 - protein, 9 aa, synthetic construct
TAFVISVFR

SEQ ID NO: 7929 - protein, 10 aa, synthetic construct
TVYVPVVGFN

SEQ ID NO: 7930 - protein, 9 aa, synthetic construct
SDVFNYMFR

SEQ ID NO: 7931 - protein, 9 aa, synthetic construct
TRLNYNGFM

SEQ ID NO: 7932 - protein, 9 aa, synthetic construct
GQVNPLHRR

SEQ ID NO: 7933 - protein, 9 aa, synthetic construct
WVFTTGTFR

SEQ ID NO: 7934 - protein, 11 aa, synthetic construct
TTICAAAHKIS

SEQ ID NO: 7935 - protein, 9 aa, synthetic construct
LLPVSVALG

SEQ ID NO: 7936 - protein, 8 aa, synthetic construct
TVFATMFR

SEQ ID NO: 7937 - protein, 8 aa, synthetic construct
TTCVGGFV

SEQ ID NO: 7938 - protein, 10 aa, synthetic construct
TGLRCECSFA

SEQ ID NO: 7939 - protein, 9 aa, synthetic construct
VSIRGHQFV

SEQ ID NO: 7940 - protein, 10 aa, synthetic construct
TRLTIRGLMY

SEQ ID NO: 7941 - protein, 8 aa, synthetic construct
TALWNRFL

SEQ ID NO: 7942 - protein, 11 aa, synthetic construct
TMFGIVGRCFK

SEQ ID NO: 7943 - protein, 13 aa, synthetic construct
TCFRMGLNTPLLI

SEQ ID NO: 7944 - protein, 9 aa, synthetic construct
TALVLGVFV

SEQ ID NO: 7945 - protein, 9 aa, synthetic construct
TVLGLNRFV

SEQ ID NO: 7946 - protein, 9 aa, synthetic construct
VWFTFVKFV

SEQ ID NO: 7947 - protein, 10 aa, synthetic construct
TVVVTGRGFL

SEQ ID NO: 7948 - protein, 12 aa, synthetic construct
EVCLIGVEFKFS

SEQ ID NO: 7949 - protein, 9 aa, synthetic construct
TGMGVRGKR

SEQ ID NO: 7950 - protein, 9 aa, synthetic construct
VGVGKLSIR

SEQ ID NO: 7951 - protein, 9 aa, synthetic construct
VALGKRGFA

SEQ ID NO: 7952 - protein, 10 aa, synthetic construct
VYLAPSIMFE

SEQ ID NO: 7953 - protein, 8 aa, synthetic construct
TVLITRFE

SEQ ID NO: 7954 - protein, 9 aa, synthetic construct
TINIGFGFR

SEQ ID NO: 7955 - protein, 9 aa, synthetic construct
TRLHYGHFA

SEQ ID NO: 7956 - protein, 9 aa, synthetic construct
TAFVNCRFV

SEQ ID NO: 7957 - protein, 10 aa, synthetic construct
VVVHGGGNIT

SEQ ID NO: 7958 - protein, 9 aa, synthetic construct
TCIKNGRFV

SEQ ID NO: 7959 - protein, 9 aa, synthetic construct
TLLSHWTFC

SEQ ID NO: 7960 - protein, 13 aa, synthetic construct
TGMMLNDLGFKMS

SEQ ID NO: 7961 - protein, 8 aa, synthetic construct
TCMRMTVD

SEQ ID NO: 7962 - protein, 12 aa, synthetic construct
TSFGIVCTFTFT

SEQ ID NO: 7963 - protein, 8 aa, synthetic construct
VVWGIRWC

SEQ ID NO: 7964 - protein, 9 aa, synthetic construct
VVVAGKYIV

SEQ ID NO: 7965 - protein, 13 aa, synthetic construct
SAFGMQGDRPAFN

SEQ ID NO: 7966 - protein, 9 aa, synthetic construct
VMVNSMSIR

SEQ ID NO: 7967 - protein, 9 aa, synthetic construct
DLWGEMVLV

SEQ ID NO: 7968 - protein, 9 aa, synthetic construct
VSHSGRAFR

SEQ ID NO: 7969 - protein, 10 aa, synthetic construct
TAFDCSIMFA

SEQ ID NO: 7970 - protein, 9 aa, synthetic construct
WVIRLGGFN

SEQ ID NO: 7971 - protein, 9 aa, synthetic construct
TSWDANGFV

SEQ ID NO: 7972 - protein, 9 aa, synthetic construct
TSIVDRGWT

SEQ ID NO: 7973 - protein, 14 aa, synthetic construct
TTVYVRGGLTIRFV

SEQ ID NO: 7974 - protein, 9 aa, synthetic construct
VVVVMARFM

SEQ ID NO: 7975 - protein, 6 aa, synthetic construct
TTFGFV

SEQ ID NO: 7976 - protein, 9 aa, synthetic construct
CNIERKSTQ

SEQ ID NO: 7977 - protein, 6 aa, synthetic construct
LDNRFK

SEQ ID NO: 7978 - protein, 10 aa, synthetic construct
VDYDGIVSFY

SEQ ID NO: 7979 - protein, 10 aa, synthetic construct
VGFNRITGFF

SEQ ID NO: 7980 - protein, 9 aa, synthetic construct
SCLVDIALR

SEQ ID NO: 7981 - protein, 9 aa, synthetic construct
VLVTVARIV

SEQ ID NO: 7982 - protein, 10 aa, synthetic construct
VEVSIRGVFK

SEQ ID NO: 7983 - protein, 9 aa, synthetic construct
TAFNDRTFS

SEQ ID NO: 7984 - protein, 10 aa, synthetic construct
VTVLGCGRFS

SEQ ID NO: 7985 - protein, 9 aa, synthetic construct
TNIERGRFV

SEQ ID NO: 7986 - protein, 9 aa, synthetic construct
TRHAMGRFS

SEQ ID NO: 7987 - protein, 9 aa, synthetic construct
TLFSKVRIV

SEQ ID NO: 7988 - protein, 10 aa, synthetic construct
VLLDQGHRFM

SEQ ID NO: 7989 - protein, 10 aa, synthetic construct
TYVVDGGGFR

SEQ ID NO: 7990 - protein, 11 aa, synthetic construct
VKYVIDEAVFR

SEQ ID NO: 7991 - protein, 9 aa, synthetic construct
TALIGVRFV

SEQ ID NO: 7992 - protein, 9 aa, synthetic construct
VAIDPRGFM

SEQ ID NO: 7993 - protein, 9 aa, synthetic construct
LVWMIKLIS

SEQ ID NO: 7994 - protein, 9 aa, synthetic construct
CVWRGYGIK

SEQ ID NO: 7995 - protein, 10 aa, synthetic construct
TMFSVVVGFS

SEQ ID NO: 7996 - protein, 10 aa, synthetic construct
VSVAGTRVFQ

SEQ ID NO: 7997 - protein, 13 aa, synthetic construct
LHDDGPRGLEVGY

SEQ ID NO: 7998 - protein, 9 aa, synthetic construct
LSFSVYCFG

SEQ ID NO: 7999 - protein, 8 aa, synthetic construct
TAVMVRLV

SEQ ID NO: 8000 - protein, 10 aa, synthetic construct
TSVLDKARMV

SEQ ID NO: 8001 - protein, 9 aa, synthetic construct
SSFMGRNIR

SEQ ID NO: 8002 - protein, 8 aa, synthetic construct
SQFHARLV

SEQ ID NO: 8003 - protein, 9 aa, synthetic construct
TRFVDRCFR

SEQ ID NO: 8004 - protein, 9 aa, synthetic construct
WSLDNGVFG

SEQ ID NO: 8005 - protein, 9 aa, synthetic construct
VSLIKRSFV

SEQ ID NO: 8006 - protein, 13 aa, synthetic construct
TICDLSGIRGRFV

SEQ ID NO: 8007 - protein, 9 aa, synthetic construct
VIFDLMRFK

SEQ ID NO: 8008 - protein, 9 aa, synthetic construct
TILAGGAFR

SEQ ID NO: 8009 - protein, 10 aa, synthetic construct
TVHIVGRGFR

SEQ ID NO: 8010 - protein, 14 aa, synthetic construct
RGFVTVDGSVYRYG

SEQ ID NO: 8011 - protein, 6 aa, synthetic construct
ISEGNR

SEQ ID NO: 8012 - protein, 9 aa, synthetic construct
VSLFRMMFV

SEQ ID NO: 8013 - protein, 9 aa, synthetic construct
VTIVSGRFD

SEQ ID NO: 8014 - protein, 9 aa, synthetic construct
TGLDVVMLN

SEQ ID NO: 8015 - protein, 10 aa, synthetic construct
TLVDRKGRFL

SEQ ID NO: 8016 - protein, 10 aa, synthetic construct
VRWGAERGFI

SEQ ID NO: 8017 - protein, 8 aa, synthetic construct
EGLERVDN

SEQ ID NO: 8018 - protein, 9 aa, synthetic construct
VTVLINKFV

SEQ ID NO: 8019 - protein, 12 aa, synthetic construct
TALFGLRVVKFL

SEQ ID NO: 8020 - protein, 9 aa, synthetic construct
TSITELRFQ

SEQ ID NO: 8021 - protein, 10 aa, synthetic construct
VFWDMRVGLE

SEQ ID NO: 8022 - protein, 10 aa, synthetic construct
VGLHADVGFL

SEQ ID NO: 8023 - protein, 8 aa, synthetic construct
TSWSGRFL

SEQ ID NO: 8024 - protein, 9 aa, synthetic construct
GNEASDDER

SEQ ID NO: 8025 - protein, 8 aa, synthetic construct
VALMHIFH

SEQ ID NO: 8026 - protein, 9 aa, synthetic construct
VVFNVKNCG

SEQ ID NO: 8027 - protein, 11 aa, synthetic construct
TEFLAKQGTFR

SEQ ID NO: 8028 - protein, 11 aa, synthetic construct
TSLDRVRIRFA

SEQ ID NO: 8029 - protein, 9 aa, synthetic construct
SVFNGFVLL

SEQ ID NO: 8030 - protein, 8 aa, synthetic construct
TMLRNVFC

SEQ ID NO: 8031 - protein, 8 aa, synthetic construct
TVLLGRFE

SEQ ID NO: 8032 - protein, 9 aa, synthetic construct
SRVSSVGFH

SEQ ID NO: 8033 - protein, 8 aa, synthetic construct
TTMVVGFR

SEQ ID NO: 8034 - protein, 6 aa, synthetic construct
LTYRIL

SEQ ID NO: 8035 - protein, 9 aa, synthetic construct
VRIVGRMIV

SEQ ID NO: 8036 - protein, 9 aa, synthetic construct
TQLFAIQFM

SEQ ID NO: 8037 - protein, 8 aa, synthetic construct
SILYTRFL

SEQ ID NO: 8038 - protein, 8 aa, synthetic construct
TALARLVM

SEQ ID NO: 8039 - protein, 12 aa, synthetic construct
TRFELTPVPRFV

SEQ ID NO: 8040 - protein, 9 aa, synthetic construct
TVYTMRMFI

SEQ ID NO: 8041 - protein, 9 aa, synthetic construct
VTLGRFRFF

SEQ ID NO: 8042 - protein, 11 aa, synthetic construct
TIIDYHKMHFE

SEQ ID NO: 8043 - protein, 9 aa, synthetic construct
TSLVGHRFM

SEQ ID NO: 8044 - protein, 9 aa, synthetic construct
LMFVPGSFK

SEQ ID NO: 8045 - protein, 10 aa, synthetic construct
TVLETPVAFR

SEQ ID NO: 8046 - protein, 9 aa, synthetic construct
TAVVRSRFV

SEQ ID NO: 8047 - protein, 9 aa, synthetic construct
TSFGRFGMR

SEQ ID NO: 8048 - protein, 8 aa, synthetic construct
TMLLRGFW

SEQ ID NO: 8049 - protein, 10 aa, synthetic construct
LAVDNLFNAG

SEQ ID NO: 8050 - protein, 10 aa, synthetic construct
LSWLDAVDRC

SEQ ID NO: 8051 - protein, 9 aa, synthetic construct
VVWGATGFI

SEQ ID NO: 8052 - protein, 8 aa, synthetic construct
TVIAGVFE

SEQ ID NO: 8053 - protein, 9 aa, synthetic construct
VIFDTFSFF

SEQ ID NO: 8054 - protein, 9 aa, synthetic construct
CALRTQRFV

SEQ ID NO: 8055 - protein, 9 aa, synthetic construct
TSISGGRFH

SEQ ID NO: 8056 - protein, 9 aa, synthetic construct
VMFQEHRFA

SEQ ID NO: 8057 - protein, 9 aa, synthetic construct
TVLGEVGFV

SEQ ID NO: 8058 - protein, 10 aa, synthetic construct
LGFSVVRAFV

SEQ ID NO: 8059 - protein, 10 aa, synthetic construct
VVLRRNMTLG

SEQ ID NO: 8060 - protein, 9 aa, synthetic construct
TLFGPDGKR

SEQ ID NO: 8061 - protein, 9 aa, synthetic construct
VTFTIEGKK

SEQ ID NO: 8062 - protein, 11 aa, synthetic construct
VVFDKTQFQFL

SEQ ID NO: 8063 - protein, 13 aa, synthetic construct
TCIVRVVNSVEFL

SEQ ID NO: 8064 - protein, 13 aa, synthetic construct
TVYSVAGPWISFD

SEQ ID NO: 8065 - protein, 9 aa, synthetic construct
VLIFHGTFV

SEQ ID NO: 8066 - protein, 13 aa, synthetic construct
TAIVVANNSVKIS

SEQ ID NO: 8067 - protein, 10 aa, synthetic construct
TCLLNVWMVL

SEQ ID NO: 8068 - protein, 10 aa, synthetic construct
SSLDIGRMLR

SEQ ID NO: 8069 - protein, 8 aa, synthetic construct
VTFRTRFL

SEQ ID NO: 8070 - protein, 10 aa, synthetic construct
WGMTLKLLFV

SEQ ID NO: 8071 - protein, 7 aa, synthetic construct
MRGNERE

SEQ ID NO: 8072 - protein, 10 aa, synthetic construct
TQVLASWGFF

SEQ ID NO: 8073 - protein, 10 aa, synthetic construct
MSINAGRQFL

SEQ ID NO: 8074 - protein, 12 aa, synthetic construct
TYVGQEGFGVFR

SEQ ID NO: 8075 - protein, 10 aa, synthetic construct
SIKRGTIVFG

SEQ ID NO: 8076 - protein, 13 aa, synthetic construct
TAVIQNNVGIYIV

SEQ ID NO: 8077 - protein, 7 aa, synthetic construct
AGWHVDC

SEQ ID NO: 8078 - protein, 8 aa, synthetic construct
SILAVRLR

SEQ ID NO: 8079 - protein, 11 aa, synthetic construct
TVMHMRTVGWM

SEQ ID NO: 8080 - protein, 9 aa, synthetic construct
VIGGSPVWT

SEQ ID NO: 8081 - protein, 9 aa, synthetic construct
VLMHPRGFL

SEQ ID NO: 8082 - protein, 12 aa, synthetic construct
TCVTDERNCMVL

SEQ ID NO: 8083 - protein, 10 aa, synthetic construct
TQLNENMRLV

SEQ ID NO: 8084 - protein, 8 aa, synthetic construct
TILASIFL

SEQ ID NO: 8085 - protein, 10 aa, synthetic construct
VSITFVGRFI

SEQ ID NO: 8086 - protein, 9 aa, synthetic construct
VTFAENGMS

SEQ ID NO: 8087 - protein, 9 aa, synthetic construct
TVVLTNGFH

SEQ ID NO: 8088 - protein, 11 aa, synthetic construct
TVFRMGVVGFW

SEQ ID NO: 8089 - protein, 9 aa, synthetic construct
TGVHVIGFT

SEQ ID NO: 8090 - protein, 14 aa, synthetic construct
MGYGLDAVGTVHVK

SEQ ID NO: 8091 - protein, 9 aa, synthetic construct
TVFVGPQLV

SEQ ID NO: 8092 - protein, 9 aa, synthetic construct
TVFTLSGFG

SEQ ID NO: 8093 - protein, 7 aa, synthetic construct
LDVNDNM

SEQ ID NO: 8094 - protein, 9 aa, synthetic construct
VYANKIGFF

SEQ ID NO: 8095 - protein, 4 aa, synthetic construct
MGLG

SEQ ID NO: 8096 - protein, 9 aa, synthetic construct
TTRHVMGFN

SEQ ID NO: 8097 - protein, 10 aa, synthetic construct
TVWKRGVGFG

SEQ ID NO: 8098 - protein, 8 aa, synthetic construct
TAHYHIFI

SEQ ID NO: 8099 - protein, 10 aa, synthetic construct
TVFTTSEGFV

SEQ ID NO: 8100 - protein, 10 aa, synthetic construct
TVLDTDMVFT

SEQ ID NO: 8101 - protein, 14 aa, synthetic construct
GKEDHNGADGNRCR

SEQ ID NO: 8102 - protein, 10 aa, synthetic construct
TRVLGDGRFV

SEQ ID NO: 8103 - protein, 10 aa, synthetic construct
TALTRGGVKC

SEQ ID NO: 8104 - protein, 9 aa, synthetic construct
TVLGQGLFL

SEQ ID NO: 8105 - protein, 9 aa, synthetic construct
TMVTSDGFK

SEQ ID NO: 8106 - protein, 6 aa, synthetic construct
FTVLLR

SEQ ID NO: 8107 - protein, 9 aa, synthetic construct
TRYIDVCFI

SEQ ID NO: 8108 - protein, 7 aa, synthetic construct
LDVVVWR

SEQ ID NO: 8109 - protein, 10 aa, synthetic construct
TVVIPGYMFV

SEQ ID NO: 8110 - protein, 9 aa, synthetic construct
SMFMNRGFA

SEQ ID NO: 8111 - protein, 8 aa, synthetic construct
TVAVRRFM

SEQ ID NO: 8112 - protein, 12 aa, synthetic construct
VLRPTVSRPQFM

SEQ ID NO: 8113 - protein, 9 aa, synthetic construct
VQLFGGKFI

SEQ ID NO: 8114 - protein, 9 aa, synthetic construct
WICDVAGFR

SEQ ID NO: 8115 - protein, 9 aa, synthetic construct
TILDVARFV

SEQ ID NO: 8116 - protein, 10 aa, synthetic construct
TGIREDGGKA

SEQ ID NO: 8117 - protein, 8 aa, synthetic construct
IAAGDMWM

SEQ ID NO: 8118 - protein, 10 aa, synthetic construct
TGLFGLIVKE

SEQ ID NO: 8119 - protein, 11 aa, synthetic construct
TELVVDRRMFI

SEQ ID NO: 8120 - protein, 13 aa, synthetic construct
ISAVGDFQIWDMM

SEQ ID NO: 8121 - protein, 9 aa, synthetic construct
LVLNAYTMV

SEQ ID NO: 8122 - protein, 10 aa, synthetic construct
SVFHAGMGVA

SEQ ID NO: 8123 - protein, 9 aa, synthetic construct
TCWDGGAFL

SEQ ID NO: 8124 - protein, 11 aa, synthetic construct
WGVTDIRMLFG

SEQ ID NO: 8125 - protein, 11 aa, synthetic construct
VRFDPSVVEFE

SEQ ID NO: 8126 - protein, 12 aa, synthetic construct
TIFRAAGLHFFW

SEQ ID NO: 8127 - protein, 11 aa, synthetic construct
WGVDSMSGGFG

SEQ ID NO: 8128 - protein, 9 aa, synthetic construct
STILDSMFM

SEQ ID NO: 8129 - protein, 9 aa, synthetic construct
SAITSMGKV

SEQ ID NO: 8130 - protein, 9 aa, synthetic construct
HIITGVGSS

SEQ ID NO: 8131 - protein, 9 aa, synthetic construct
TMVNQQCFL

SEQ ID NO: 8132 - protein, 11 aa, synthetic construct
STVNRSSARFE

SEQ ID NO: 8133 - protein, 8 aa, synthetic construct
VTWEKCFL

SEQ ID NO: 8134 - protein, 9 aa, synthetic construct
TCLGVDAWV

SEQ ID NO: 8135 - protein, 13 aa, synthetic construct
FTGGWVSLAVSLY

SEQ ID NO: 8136 - protein, 11 aa, synthetic construct
SGGGVVQVVSA

SEQ ID NO: 8137 - protein, 10 aa, synthetic construct
TKFKRKNGFT

SEQ ID NO: 8138 - protein, 6 aa, synthetic construct
TTVRFT

SEQ ID NO: 8139 - protein, 9 aa, synthetic construct
SVIVKRGID

SEQ ID NO: 8140 - protein, 9 aa, synthetic construct
SVLEMGRVV

SEQ ID NO: 8141 - protein, 9 aa, synthetic construct
SVFFVDRFS

SEQ ID NO: 8142 - protein, 7 aa, synthetic construct
LTRRSLR

SEQ ID NO: 8143 - protein, 8 aa, synthetic construct
TTFAQLKA

SEQ ID NO: 8144 - protein, 10 aa, synthetic construct
SLLNSRIGRT

SEQ ID NO: 8145 - protein, 11 aa, synthetic construct
IEFWVTARMFL

SEQ ID NO: 8146 - protein, 9 aa, synthetic construct
TSVTCNGFI

SEQ ID NO: 8147 - protein, 11 aa, synthetic construct
VRITFNPMVFH

SEQ ID NO: 8148 - protein, 12 aa, synthetic construct
TGLTSVGVSVFV

SEQ ID NO: 8149 - protein, 11 aa, synthetic construct
NSDFIRINFCG

SEQ ID NO: 8150 - protein, 9 aa, synthetic construct
TTIGCFGKR

SEQ ID NO: 8151 - protein, 10 aa, synthetic construct
VIFTALMLFI

SEQ ID NO: 8152 - protein, 9 aa, synthetic construct
TVLALGMFG

SEQ ID NO: 8153 - protein, 8 aa, synthetic construct
LMFGLRFE

SEQ ID NO: 8154 - protein, 9 aa, synthetic construct
TVFANGGFQ

SEQ ID NO: 8155 - protein, 10 aa, synthetic construct
RIVRARTLFG

SEQ ID NO: 8156 - protein, 6 aa, synthetic construct
TAVGFV

SEQ ID NO: 8157 - protein, 10 aa, synthetic construct
THVVAHVGFR

SEQ ID NO: 8158 - protein, 11 aa, synthetic construct
TAVNVRQHNMV

SEQ ID NO: 8159 - protein, 9 aa, synthetic construct
LAVGVGKWA

SEQ ID NO: 8160 - protein, 9 aa, synthetic construct
VTVGTGGFL

SEQ ID NO: 8161 - protein, 9 aa, synthetic construct
TVFKFPEMV

SEQ ID NO: 8162 - protein, 14 aa, synthetic construct
TAMGVVSGLSQLFV

SEQ ID NO: 8163 - protein, 10 aa, synthetic construct
TAWGHVMLFG

SEQ ID NO: 8164 - protein, 9 aa, synthetic construct
WVVSAGMFV

SEQ ID NO: 8165 - protein, 9 aa, synthetic construct
LWVGISLVR

SEQ ID NO: 8166 - protein, 9 aa, synthetic construct
TVVAFPWFV

SEQ ID NO: 8167 - protein, 9 aa, synthetic construct
VILRDGMFD

SEQ ID NO: 8168 - protein, 12 aa, synthetic construct
TVLVILQIVRID

SEQ ID NO: 8169 - protein, 10 aa, synthetic construct
TVLAGRMGFV

SEQ ID NO: 8170 - protein, 9 aa, synthetic construct
WSVINAAFH

SEQ ID NO: 8171 - protein, 11 aa, synthetic construct
CSMLVGLCRFI

SEQ ID NO: 8172 - protein, 11 aa, synthetic construct
VVIKRIPHGFV

SEQ ID NO: 8173 - protein, 9 aa, synthetic construct
VVFSGHVFM

SEQ ID NO: 8174 - protein, 9 aa, synthetic construct
TLREVMRFK

SEQ ID NO: 8175 - protein, 9 aa, synthetic construct
MQIRKDKFA

SEQ ID NO: 8176 - protein, 9 aa, synthetic construct
TYVVVDGLV

SEQ ID NO: 8177 - protein, 10 aa, synthetic construct
VNIVDKVGKH

SEQ ID NO: 8178 - protein, 9 aa, synthetic construct
LCFSKFRFV

SEQ ID NO: 8179 - protein, 9 aa, synthetic construct
TSIIGELIR

SEQ ID NO: 8180 - protein, 8 aa, synthetic construct
TVIQLGFM

SEQ ID NO: 8181 - protein, 9 aa, synthetic construct
TIVCRLRIR

SEQ ID NO: 8182 - protein, 9 aa, synthetic construct
TQFLSASYI

SEQ ID NO: 8183 - protein, 14 aa, synthetic construct
SSVGFDDEGFRIFV

SEQ ID NO: 8184 - protein, 9 aa, synthetic construct
TMFHRHSFE

SEQ ID NO: 8185 - protein, 6 aa, synthetic construct
VEDMTA

SEQ ID NO: 8186 - protein, 6 aa, synthetic construct
FIRFEE

SEQ ID NO: 8187 - protein, 8 aa, synthetic construct
TVWSLAFM

SEQ ID NO: 8188 - protein, 10 aa, synthetic construct
VEVSLMSGFS

SEQ ID NO: 8189 - protein, 13 aa, synthetic construct
SIVDRNLRGFCIV

SEQ ID NO: 8190 - protein, 10 aa, synthetic construct
TFQWASWGVE

SEQ ID NO: 8191 - protein, 9 aa, synthetic construct
TGLKDFEIN

SEQ ID NO: 8192 - protein, 11 aa, synthetic construct
LCLTRGLYLFR

SEQ ID NO: 8193 - protein, 11 aa, synthetic construct
VALNIGLARFV

SEQ ID NO: 8194 - protein, 9 aa, synthetic construct
AIIQNGRFT

SEQ ID NO: 8195 - protein, 13 aa, synthetic construct
VMLVVEDNRFVPM

SEQ ID NO: 8196 - protein, 9 aa, synthetic construct
KMLTGGMFV

SEQ ID NO: 8197 - protein, 9 aa, synthetic construct
VAVGMRAIL

SEQ ID NO: 8198 - protein, 11 aa, synthetic construct
TLVRELMPYIS

SEQ ID NO: 8199 - protein, 12 aa, synthetic construct
TIFNPSRTAGKG

SEQ ID NO: 8200 - protein, 10 aa, synthetic construct
TCLASLVGFI

SEQ ID NO: 8201 - protein, 10 aa, synthetic construct
TTIGQKCDFR

SEQ ID NO: 8202 - protein, 9 aa, synthetic construct
WKMNSVGLT

SEQ ID NO: 8203 - protein, 13 aa, synthetic construct
TVLMDVVSERRFV

SEQ ID NO: 8204 - protein, 10 aa, synthetic construct
TVVRVTGRFF

SEQ ID NO: 8205 - protein, 11 aa, synthetic construct
TSFDYRAMHFN

SEQ ID NO: 8206 - protein, 11 aa, synthetic construct
VLVRMGMFVFQ

SEQ ID NO: 8207 - protein, 12 aa, synthetic construct
ISIVNGPPFLLT

SEQ ID NO: 8208 - protein, 8 aa, synthetic construct
VVINEGIR

SEQ ID NO: 8209 - protein, 10 aa, synthetic construct
TGVFTDMRFS

SEQ ID NO: 8210 - protein, 14 aa, synthetic construct
QNVVEVLVRLGKIV

SEQ ID NO: 8211 - protein, 8 aa, synthetic construct
TSIRVLFI

SEQ ID NO: 8212 - protein, 9 aa, synthetic construct
TVLVGVFFD

SEQ ID NO: 8213 - protein, 8 aa, synthetic construct
SQLIRALL

SEQ ID NO: 8214 - protein, 9 aa, synthetic construct
TVFSLARRG

SEQ ID NO: 8215 - protein, 8 aa, synthetic construct
TAIGAYVE

SEQ ID NO: 8216 - protein, 9 aa, synthetic construct
TCTASLAFL

SEQ ID NO: 8217 - protein, 11 aa, synthetic construct
WRIDLVRVQVR

SEQ ID NO: 8218 - protein, 6 aa, synthetic construct
PWFRDG

SEQ ID NO: 8219 - protein, 8 aa, synthetic construct
TLLERVFI

SEQ ID NO: 8220 - protein, 7 aa, synthetic construct
TVLRDFA

SEQ ID NO: 8221 - protein, 11 aa, synthetic construct
ALLDVAMRRFR

SEQ ID NO: 8222 - protein, 7 aa, synthetic construct
EGSTVSN

SEQ ID NO: 8223 - protein, 9 aa, synthetic construct
TSLNAMRFV

SEQ ID NO: 8224 - protein, 9 aa, synthetic construct
TYVNDCGFG

SEQ ID NO: 8225 - protein, 9 aa, synthetic construct
VGVRKGGFV

SEQ ID NO: 8226 - protein, 9 aa, synthetic construct
TLFCASSIV

SEQ ID NO: 8227 - protein, 9 aa, synthetic construct
AAVSKLRFL

SEQ ID NO: 8228 - protein, 10 aa, synthetic construct
TMLQLGVGFA

SEQ ID NO: 8229 - protein, 13 aa, synthetic construct
TAVRTDGSSKNFA

SEQ ID NO: 8230 - protein, 9 aa, synthetic construct
VVWQGNRFR

SEQ ID NO: 8231 - protein, 9 aa, synthetic construct
TAFNNNGVM

SEQ ID NO: 8232 - protein, 11 aa, synthetic construct
LAVVGVRFIIK

SEQ ID NO: 8233 - protein, 10 aa, synthetic construct
IGSDVSLVNG

SEQ ID NO: 8234 - protein, 10 aa, synthetic construct
TALSKVGGFN

SEQ ID NO: 8235 - protein, 13 aa, synthetic construct
TVLGTRADSVRFM

SEQ ID NO: 8236 - protein, 9 aa, synthetic construct
TVVWDNRIL

SEQ ID NO: 8237 - protein, 9 aa, synthetic construct
TLVGREGVF

SEQ ID NO: 8238 - protein, 9 aa, synthetic construct
VAVVDKYFS

SEQ ID NO: 8239 - protein, 9 aa, synthetic construct
TTVANVKIR

SEQ ID NO: 8240 - protein, 9 aa, synthetic construct
TVLGAVGIV

SEQ ID NO: 8241 - protein, 8 aa, synthetic construct
VVWNGMFT

SEQ ID NO: 8242 - protein, 8 aa, synthetic construct
AVFGGGFK

SEQ ID NO: 8243 - protein, 8 aa, synthetic construct
VMFANGFI

SEQ ID NO: 8244 - protein, 12 aa, synthetic construct
TQVVIGPRSHVT

SEQ ID NO: 8245 - protein, 9 aa, synthetic construct
TVIRMGRFG

SEQ ID NO: 8246 - protein, 10 aa, synthetic construct
WVILDHWEFG

SEQ ID NO: 8247 - protein, 11 aa, synthetic construct
SALDGNTARFL

SEQ ID NO: 8248 - protein, 11 aa, synthetic construct
TLVKVQIGVIL

SEQ ID NO: 8249 - protein, 8 aa, synthetic construct
TCLVVSFV

SEQ ID NO: 8250 - protein, 8 aa, synthetic construct
AMTNCNID

SEQ ID NO: 8251 - protein, 10 aa, synthetic construct
SMFSDELLLR

SEQ ID NO: 8252 - protein, 11 aa, synthetic construct
VLLDAETGRLV

SEQ ID NO: 8253 - protein, 13 aa, synthetic construct
TGLENGAGIIRFR

SEQ ID NO: 8254 - protein, 10 aa, synthetic construct
VGSTNDVGFW

SEQ ID NO: 8255 - protein, 9 aa, synthetic construct
TCLSAHGLT

SEQ ID NO: 8256 - protein, 11 aa, synthetic construct
DGIARPSDLDK

SEQ ID NO: 8257 - protein, 9 aa, synthetic construct
TDFTGAKLE

SEQ ID NO: 8258 - protein, 10 aa, synthetic construct
SALVDWVRLM

SEQ ID NO: 8259 - protein, 8 aa, synthetic construct
TCLGVTLI

SEQ ID NO: 8260 - protein, 10 aa, synthetic construct
TSLDADSRFR

SEQ ID NO: 8261 - protein, 10 aa, synthetic construct
LADVWDAITL

SEQ ID NO: 8262 - protein, 9 aa, synthetic construct
TVLSLNGKV

SEQ ID NO: 8263 - protein, 10 aa, synthetic construct
VYIEKSIGKR

SEQ ID NO: 8264 - protein, 13 aa, synthetic construct
TQYVAVSLVPGFR

SEQ ID NO: 8265 - protein, 10 aa, synthetic construct
VAIDHSRGFL

SEQ ID NO: 8266 - protein, 9 aa, synthetic construct
VVVIGMDFG

SEQ ID NO: 8267 - protein, 9 aa, synthetic construct
ACLGPAGMT

SEQ ID NO: 8268 - protein, 10 aa, synthetic construct
MGMASSGLFI

SEQ ID NO: 8269 - protein, 9 aa, synthetic construct
THVKLGRLV

SEQ ID NO: 8270 - protein, 14 aa, synthetic construct
TTWESPVSGDMRFA

SEQ ID NO: 8271 - protein, 8 aa, synthetic construct
VGLQGMFI

SEQ ID NO: 8272 - protein, 8 aa, synthetic construct
TAFHNGKM

SEQ ID NO: 8273 - protein, 9 aa, synthetic construct
VIWTEHAFR

SEQ ID NO: 8274 - protein, 10 aa, synthetic construct
LAVVVGVGFV

SEQ ID NO: 8275 - protein, 9 aa, synthetic construct
TVIIDWVVG

SEQ ID NO: 8276 - protein, 9 aa, synthetic construct
VTMVKCHFY

SEQ ID NO: 8277 - protein, 11 aa, synthetic construct
KLRNNEEGLVV

SEQ ID NO: 8278 - protein, 10 aa, synthetic construct
TSFGVRCGIR

SEQ ID NO: 8279 - protein, 10 aa, synthetic construct
LVVLNSGRLL

SEQ ID NO: 8280 - protein, 9 aa, synthetic construct
TRHCTNGFV

SEQ ID NO: 8281 - protein, 9 aa, synthetic construct
TVCDGFAFV

SEQ ID NO: 8282 - protein, 6 aa, synthetic construct
TSVVAR

SEQ ID NO: 8283 - protein, 12 aa, synthetic construct
IEDGDLIHISVL

SEQ ID NO: 8284 - protein, 14 aa, synthetic construct
IVVSRLPDYRVVFC

SEQ ID NO: 8285 - protein, 10 aa, synthetic construct
TVIVGWKWFS

SEQ ID NO: 8286 - protein, 11 aa, synthetic construct
TVIGRVKMIIM

SEQ ID NO: 8287 - protein, 8 aa, synthetic construct
TTFVRVKE

SEQ ID NO: 8288 - protein, 9 aa, synthetic construct
TCIVCMMIR

SEQ ID NO: 8289 - protein, 11 aa, synthetic construct
DAVSDRTLRLV

SEQ ID NO: 8290 - protein, 10 aa, synthetic construct
TDFKEDGTFR

SEQ ID NO: 8291 - protein, 9 aa, synthetic construct
VLVVKTGIK

SEQ ID NO: 8292 - protein, 12 aa, synthetic construct
VGIEDVVRLRFC

SEQ ID NO: 8293 - protein, 8 aa, synthetic construct
TAFKMRFV

SEQ ID NO: 8294 - protein, 10 aa, synthetic construct
PVWVANVGIL

SEQ ID NO: 8295 - protein, 8 aa, synthetic construct
SVFRAYLS

SEQ ID NO: 8296 - protein, 6 aa, synthetic construct
TDAVFA

SEQ ID NO: 8297 - protein, 9 aa, synthetic construct
VSWERNRFK

SEQ ID NO: 8298 - protein, 9 aa, synthetic construct
VMVDVARFL

SEQ ID NO: 8299 - protein, 8 aa, synthetic construct
TVWKTGFY

SEQ ID NO: 8300 - protein, 8 aa, synthetic construct
VVLFPFGV

SEQ ID NO: 8301 - protein, 9 aa, synthetic construct
ASLMDNMFY

SEQ ID NO: 8302 - protein, 10 aa, synthetic construct
TMFNVEHGFN

SEQ ID NO: 8303 - protein, 11 aa, synthetic construct
MWLRRDVGRFE

SEQ ID NO: 8304 - protein, 6 aa, synthetic construct
TCIAFR

SEQ ID NO: 8305 - protein, 13 aa, synthetic construct
TRVLVKDNRCMIQ

SEQ ID NO: 8306 - protein, 6 aa, synthetic construct
TNRMFV

SEQ ID NO: 8307 - protein, 11 aa, synthetic construct
SVFNVAVRGVM

SEQ ID NO: 8308 - protein, 9 aa, synthetic construct
DCWGIVNIC

SEQ ID NO: 8309 - protein, 8 aa, synthetic construct
TDFVHYFI

SEQ ID NO: 8310 - protein, 8 aa, synthetic construct
TVFKGEFV

SEQ ID NO: 8311 - protein, 9 aa, synthetic construct
TGLAKKGFV

SEQ ID NO: 8312 - protein, 9 aa, synthetic construct
TAFGSVGWN

SEQ ID NO: 8313 - protein, 8 aa, synthetic construct
TGFQEGFV

SEQ ID NO: 8314 - protein, 9 aa, synthetic construct
TVIANAGFV

SEQ ID NO: 8315 - protein, 9 aa, synthetic construct
TALVGHNFS

SEQ ID NO: 8316 - protein, 7 aa, synthetic construct
LLLGAWL

SEQ ID NO: 8317 - protein, 13 aa, synthetic construct
TGFGTSTENCGFW

SEQ ID NO: 8318 - protein, 10 aa, synthetic construct
TAISRAIVFN

SEQ ID NO: 8319 - protein, 11 aa, synthetic construct
VMFLGNMFRFV

SEQ ID NO: 8320 - protein, 9 aa, synthetic construct
TTYGNFRFL

SEQ ID NO: 8321 - protein, 13 aa, synthetic construct
TTFGRTGEVFGKV

SEQ ID NO: 8322 - protein, 9 aa, synthetic construct
TTFAHCGFD

SEQ ID NO: 8323 - protein, 8 aa, synthetic construct
VVRTQFFS

SEQ ID NO: 8324 - protein, 8 aa, synthetic construct
MSFEEMFR

SEQ ID NO: 8325 - protein, 9 aa, synthetic construct
VIVTEVRFA

SEQ ID NO: 8326 - protein, 8 aa, synthetic construct
VVWGGRFV

SEQ ID NO: 8327 - protein, 8 aa, synthetic construct
TLFLNTFM

SEQ ID NO: 8328 - protein, 8 aa, synthetic construct
PTQAISTL

SEQ ID NO: 8329 - protein, 10 aa, synthetic construct
TVLVTDAAFR

SEQ ID NO: 8330 - protein, 8 aa, synthetic construct
TVVLDHFS

SEQ ID NO: 8331 - protein, 9 aa, synthetic construct
TSVSDIGFL

SEQ ID NO: 8332 - protein, 9 aa, synthetic construct
LVIGTVDVR

SEQ ID NO: 8333 - protein, 9 aa, synthetic construct
LFIDAVGVS

SEQ ID NO: 8334 - protein, 12 aa, synthetic construct
GDKLAATHLRSV

SEQ ID NO: 8335 - protein, 9 aa, synthetic construct
TTHVLAGFK

SEQ ID NO: 8336 - protein, 14 aa, synthetic construct
VAAIRTATGILTFK

SEQ ID NO: 8337 - protein, 9 aa, synthetic construct
VVIRVRGFT

SEQ ID NO: 8338 - protein, 9 aa, synthetic construct
VGFTAATLR

SEQ ID NO: 8339 - protein, 9 aa, synthetic construct
TAMDIRMFV

SEQ ID NO: 8340 - protein, 7 aa, synthetic construct
VTATVFV

SEQ ID NO: 8341 - protein, 11 aa, synthetic construct
TAVQVDSNRIA

SEQ ID NO: 8342 - protein, 9 aa, synthetic construct
TILSGARFH

SEQ ID NO: 8343 - protein, 9 aa, synthetic construct
VVVAVSGFL

SEQ ID NO: 8344 - protein, 12 aa, synthetic construct
TAFRAAQQSRFV

SEQ ID NO: 8345 - protein, 10 aa, synthetic construct
TTILDQLGFY

SEQ ID NO: 8346 - protein, 13 aa, synthetic construct
SALEMIGTAIRLI

SEQ ID NO: 8347 - protein, 11 aa, synthetic construct
AKHRVFLAFEN

SEQ ID NO: 8348 - protein, 9 aa, synthetic construct
TVMHYMGKL

SEQ ID NO: 8349 - protein, 10 aa, synthetic construct
TTFNLIFKFL

SEQ ID NO: 8350 - protein, 6 aa, synthetic construct
TSDQFL

SEQ ID NO: 8351 - protein, 10 aa, synthetic construct
LRAIFFLLED

SEQ ID NO: 8352 - protein, 9 aa, synthetic construct
TTVGVKGLT

SEQ ID NO: 8353 - protein, 9 aa, synthetic construct
TTVTHMCVV

SEQ ID NO: 8354 - protein, 8 aa, synthetic construct
TVGVPFGR

SEQ ID NO: 8355 - protein, 10 aa, synthetic construct
VRLNARPALD

SEQ ID NO: 8356 - protein, 9 aa, synthetic construct
TVLNVTRFD

SEQ ID NO: 8357 - protein, 9 aa, synthetic construct
TCIMMGRVN

SEQ ID NO: 8358 - protein, 9 aa, synthetic construct
TIHLAGKFV

SEQ ID NO: 8359 - protein, 8 aa, synthetic construct
IMVNWNWL

SEQ ID NO: 8360 - protein, 9 aa, synthetic construct
LSVSGGRFI

SEQ ID NO: 8361 - protein, 10 aa, synthetic construct
TVFWNYTRFV

SEQ ID NO: 8362 - protein, 8 aa, synthetic construct
TTVGLKVS

SEQ ID NO: 8363 - protein, 10 aa, synthetic construct
TSLELSWVII

SEQ ID NO: 8364 - protein, 13 aa, synthetic construct
LRAIWDLVVAYHE

SEQ ID NO: 8365 - protein, 13 aa, synthetic construct
SVFRFIDVPVHFV

SEQ ID NO: 8366 - protein, 10 aa, synthetic construct
THVPVDYRFA

SEQ ID NO: 8367 - protein, 12 aa, synthetic construct
TWFKLLPKFGFE

SEQ ID NO: 8368 - protein, 9 aa, synthetic construct
TAFVGMHVR

SEQ ID NO: 8369 - protein, 9 aa, synthetic construct
TSVTLGGFS

SEQ ID NO: 8370 - protein, 9 aa, synthetic construct
TVLTFNSFA

SEQ ID NO: 8371 - protein, 14 aa, synthetic construct
TMIKGIGMYTTFFV

SEQ ID NO: 8372 - protein, 8 aa, synthetic construct
TQVLDAIE

SEQ ID NO: 8373 - protein, 8 aa, synthetic construct
ITKVRVAE

SEQ ID NO: 8374 - protein, 11 aa, synthetic construct
TAVRWSQPLII

SEQ ID NO: 8375 - protein, 6 aa, synthetic construct
TDLVFS

SEQ ID NO: 8376 - protein, 8 aa, synthetic construct
VYVQLKFS

SEQ ID NO: 8377 - protein, 11 aa, synthetic construct
TGVVERGSRFV

SEQ ID NO: 8378 - protein, 7 aa, synthetic construct
LDLACWT

SEQ ID NO: 8379 - protein, 9 aa, synthetic construct
VTWSSVGFF

SEQ ID NO: 8380 - protein, 9 aa, synthetic construct
LGHNTWNGG

SEQ ID NO: 8381 - protein, 11 aa, synthetic construct
TLVDMSDFRFR

SEQ ID NO: 8382 - protein, 11 aa, synthetic construct
TVWRAPSFGFV

SEQ ID NO: 8383 - protein, 9 aa, synthetic construct
LVVVGRMIS

SEQ ID NO: 8384 - protein, 10 aa, synthetic construct
TTIVSFRGFV

SEQ ID NO: 8385 - protein, 9 aa, synthetic construct
VLVEERTFR

SEQ ID NO: 8386 - protein, 9 aa, synthetic construct
TSFARGMFC

SEQ ID NO: 8387 - protein, 10 aa, synthetic construct
VNLSRAMTFR

SEQ ID NO: 8388 - protein, 6 aa, synthetic construct
TCVDFS

SEQ ID NO: 8389 - protein, 9 aa, synthetic construct
TGIVGHHLA

SEQ ID NO: 8390 - protein, 9 aa, synthetic construct
TMCTSISIT

SEQ ID NO: 8391 - protein, 9 aa, synthetic construct
TAKNREGFV

SEQ ID NO: 8392 - protein, 8 aa, synthetic construct
VEFRFGFL

SEQ ID NO: 8393 - protein, 10 aa, synthetic construct
TALVSMRGFR

SEQ ID NO: 8394 - protein, 8 aa, synthetic construct
TGMGIRMF

SEQ ID NO: 8395 - protein, 6 aa, synthetic construct
VDYRLV

SEQ ID NO: 8396 - protein, 8 aa, synthetic construct
TCVGTNIN

SEQ ID NO: 8397 - protein, 11 aa, synthetic construct
VGLASDPTRIV

SEQ ID NO: 8398 - protein, 8 aa, synthetic construct
TVVNQSVC

SEQ ID NO: 8399 - protein, 13 aa, synthetic construct
TAFRLGVVRPHKQ

SEQ ID NO: 8400 - protein, 9 aa, synthetic construct
LSIRRGIVG

SEQ ID NO: 8401 - protein, 12 aa, synthetic construct
TRVCIAACVVKE

SEQ ID NO: 8402 - protein, 9 aa, synthetic construct
VEFNGCVFS

SEQ ID NO: 8403 - protein, 6 aa, synthetic construct
TSVGFM

SEQ ID NO: 8404 - protein, 8 aa, synthetic construct
TQFLGRIR

SEQ ID NO: 8405 - protein, 10 aa, synthetic construct
TSVMMLMRFF

SEQ ID NO: 8406 - protein, 11 aa, synthetic construct
TSFHSAQGRFR

SEQ ID NO: 8407 - protein, 9 aa, synthetic construct
AFGTLCVKL

SEQ ID NO: 8408 - protein, 8 aa, synthetic construct
TMLVRFFL

SEQ ID NO: 8409 - protein, 9 aa, synthetic construct
VTFEIGGFV

SEQ ID NO: 8410 - protein, 8 aa, synthetic construct
TVLMCRVL

SEQ ID NO: 8411 - protein, 10 aa, synthetic construct
VGLTSVAGFR

SEQ ID NO: 8412 - protein, 9 aa, synthetic construct
VVFGNFSLF

SEQ ID NO: 8413 - protein, 8 aa, synthetic construct
TTVSNIVC

SEQ ID NO: 8414 - protein, 10 aa, synthetic construct
TGIERGVRPT

SEQ ID NO: 8415 - protein, 10 aa, synthetic construct
LIVCNSVGVK

SEQ ID NO: 8416 - protein, 9 aa, synthetic construct
TRINDRRIV

SEQ ID NO: 8417 - protein, 11 aa, synthetic construct
TVHVMAASMFA

SEQ ID NO: 8418 - protein, 9 aa, synthetic construct
TMVTRIGFV

SEQ ID NO: 8419 - protein, 12 aa, synthetic construct
VHIVGTPVYGFV

SEQ ID NO: 8420 - protein, 9 aa, synthetic construct
VSFFGSVFR

SEQ ID NO: 8421 - protein, 10 aa, synthetic construct
TCLASGRTFQ

SEQ ID NO: 8422 - protein, 9 aa, synthetic construct
TALGLQRFN

SEQ ID NO: 8423 - protein, 10 aa, synthetic construct
TVIDRGIGFV

SEQ ID NO: 8424 - protein, 9 aa, synthetic construct
TAMLDTGRV

SEQ ID NO: 8425 - protein, 8 aa, synthetic construct
TVIRVGIV

SEQ ID NO: 8426 - protein, 9 aa, synthetic construct
TTFSVDGKT

SEQ ID NO: 8427 - protein, 9 aa, synthetic construct
TALVGLYFM

SEQ ID NO: 8428 - protein, 8 aa, synthetic construct
SDMGVLKR

SEQ ID NO: 8429 - protein, 10 aa, synthetic construct
TALNSRMGFI

SEQ ID NO: 8430 - protein, 9 aa, synthetic construct
TDFVSGMFV

SEQ ID NO: 8431 - protein, 6 aa, synthetic construct
TTFIFH

SEQ ID NO: 8432 - protein, 10 aa, synthetic construct
LSWDIHGGIS

SEQ ID NO: 8433 - protein, 10 aa, synthetic construct
DPFVLIGLSG

SEQ ID NO: 8434 - protein, 10 aa, synthetic construct
TMIGVTAVFM

SEQ ID NO: 8435 - protein, 11 aa, synthetic construct
MEFNNAVGLFI

SEQ ID NO: 8436 - protein, 8 aa, synthetic construct
IADGGQRM

SEQ ID NO: 8437 - protein, 9 aa, synthetic construct
VGHGKFGFT

SEQ ID NO: 8438 - protein, 8 aa, synthetic construct
TALDTRIR

SEQ ID NO: 8439 - protein, 7 aa, synthetic construct
LHCKRWV

SEQ ID NO: 8440 - protein, 10 aa, synthetic construct
TTLVVGFRLD

SEQ ID NO: 8441 - protein, 14 aa, synthetic construct
TSFVVMNLERGVFR

SEQ ID NO: 8442 - protein, 9 aa, synthetic construct
DMWGCVVLA

SEQ ID NO: 8443 - protein, 9 aa, synthetic construct
SVVGCLRFN

SEQ ID NO: 8444 - protein, 14 aa, synthetic construct
IGFFKFLEVRVVWV

SEQ ID NO: 8445 - protein, 9 aa, synthetic construct
VKFIMGQFR

SEQ ID NO: 8446 - protein, 13 aa, synthetic construct
TVLTHSDTLISLH

SEQ ID NO: 8447 - protein, 8 aa, synthetic construct
RKARWHHQ

SEQ ID NO: 8448 - protein, 13 aa, synthetic construct
TKMVAENGHVAVM

SEQ ID NO: 8449 - protein, 9 aa, synthetic construct
AGIEHGAIL

SEQ ID NO: 8450 - protein, 9 aa, synthetic construct
TTFISTKLR

SEQ ID NO: 8451 - protein, 11 aa, synthetic construct
VVVLRKMGMFV

SEQ ID NO: 8452 - protein, 7 aa, synthetic construct
DGGEGPI

SEQ ID NO: 8453 - protein, 8 aa, synthetic construct
TIMFEIFN

SEQ ID NO: 8454 - protein, 9 aa, synthetic construct
STVLGGHLL

SEQ ID NO: 8455 - protein, 12 aa, synthetic construct
TRFTPHNPPYKR

SEQ ID NO: 8456 - protein, 8 aa, synthetic construct
WVISLVFQ

SEQ ID NO: 8457 - protein, 10 aa, synthetic construct
TTVRWWLGFV

SEQ ID NO: 8458 - protein, 9 aa, synthetic construct
TALGMIRFE

SEQ ID NO: 8459 - protein, 13 aa, synthetic construct
RQIRHNEHGLEFA

SEQ ID NO: 8460 - protein, 8 aa, synthetic construct
TRIKNAVV

SEQ ID NO: 8461 - protein, 9 aa, synthetic construct
VVNHPSRML

SEQ ID NO: 8462 - protein, 13 aa, synthetic construct
ICLLGIGRFVCFR

SEQ ID NO: 8463 - protein, 10 aa, synthetic construct
TLYNLGMRFI

SEQ ID NO: 8464 - protein, 14 aa, synthetic construct
TVVGRLDSVITFFA

SEQ ID NO: 8465 - protein, 8 aa, synthetic construct
TVWNIIFA

SEQ ID NO: 8466 - protein, 8 aa, synthetic construct
VIVRERFC

SEQ ID NO: 8467 - protein, 10 aa, synthetic construct
VIVRMSIVFA

SEQ ID NO: 8468 - protein, 9 aa, synthetic construct
TVIDPGHLF

SEQ ID NO: 8469 - protein, 10 aa, synthetic construct
LHSIYGIWGA

SEQ ID NO: 8470 - protein, 11 aa, synthetic construct
TCLENSGVRII

SEQ ID NO: 8471 - protein, 9 aa, synthetic construct
AMFIYGAFD

SEQ ID NO: 8472 - protein, 9 aa, synthetic construct
VSSCCSGFS

SEQ ID NO: 8473 - protein, 11 aa, synthetic construct
TRIIPDRWMFA

SEQ ID NO: 8474 - protein, 10 aa, synthetic construct
TIQVWDWILG

SEQ ID NO: 8475 - protein, 9 aa, synthetic construct
SIFKNVVKD

SEQ ID NO: 8476 - protein, 10 aa, synthetic construct
TTLVVGSCFL

SEQ ID NO: 8477 - protein, 10 aa, synthetic construct
VYSLDRVWLV

SEQ ID NO: 8478 - protein, 11 aa, synthetic construct
TAMSGYHVGFV

SEQ ID NO: 8479 - protein, 9 aa, synthetic construct
CEVQVNKEV

SEQ ID NO: 8480 - protein, 8 aa, synthetic construct
SYWHRMKL

SEQ ID NO: 8481 - protein, 9 aa, synthetic construct
TQITSAGFV

SEQ ID NO: 8482 - protein, 10 aa, synthetic construct
TVFKTVFGRV

SEQ ID NO: 8483 - protein, 14 aa, synthetic construct
TLCGGHRIDGVLVR

SEQ ID NO: 8484 - protein, 10 aa, synthetic construct
TFLVAMRHKR

SEQ ID NO: 8485 - protein, 8 aa, synthetic construct
VIVAGARV

SEQ ID NO: 8486 - protein, 10 aa, synthetic construct
VCAIEDYGFV

SEQ ID NO: 8487 - protein, 9 aa, synthetic construct
SVVSTGGFR

SEQ ID NO: 8488 - protein, 10 aa, synthetic construct
TALSLTGAFR

SEQ ID NO: 8489 - protein, 11 aa, synthetic construct
IMKYILMGEAT

SEQ ID NO: 8490 - protein, 9 aa, synthetic construct
SLLGPGRFD

SEQ ID NO: 8491 - protein, 9 aa, synthetic construct
TTIVANRIG

SEQ ID NO: 8492 - protein, 8 aa, synthetic construct
TTISRGFS

SEQ ID NO: 8493 - protein, 8 aa, synthetic construct
TAWDLAFE

SEQ ID NO: 8494 - protein, 11 aa, synthetic construct
TTVAQRAARFD

SEQ ID NO: 8495 - protein, 10 aa, synthetic construct
IAFSLDAGFG

SEQ ID NO: 8496 - protein, 11 aa, synthetic construct
NGCNNHEFVWW

SEQ ID NO: 8497 - protein, 10 aa, synthetic construct
TCIGGRPNFR

SEQ ID NO: 8498 - protein, 9 aa, synthetic construct
LLPFSIVNV

SEQ ID NO: 8499 - protein, 8 aa, synthetic construct
TLIDTLIK

SEQ ID NO: 8500 - protein, 6 aa, synthetic construct
VDVRIR

SEQ ID NO: 8501 - protein, 10 aa, synthetic construct
VQLVDCVGFV

SEQ ID NO: 8502 - protein, 9 aa, synthetic construct
FLSGDYIFS

SEQ ID NO: 8503 - protein, 10 aa, synthetic construct
TNFVASKFFT

SEQ ID NO: 8504 - protein, 9 aa, synthetic construct
FIAVPECCR

SEQ ID NO: 8505 - protein, 9 aa, synthetic construct
VVAGIRAFV

SEQ ID NO: 8506 - protein, 10 aa, synthetic construct
TLLIMGVSFE

SEQ ID NO: 8507 - protein, 10 aa, synthetic construct
TSLNHRLGKL

SEQ ID NO: 8508 - protein, 9 aa, synthetic construct
TCVTRIGVQ

SEQ ID NO: 8509 - protein, 10 aa, synthetic construct
TFFGPQDAFI

SEQ ID NO: 8510 - protein, 9 aa, synthetic construct
TAIGTRGFD

SEQ ID NO: 8511 - protein, 9 aa, synthetic construct
ATMTSGRLV

SEQ ID NO: 8512 - protein, 14 aa, synthetic construct
DSQHGGLIWLNLCG

SEQ ID NO: 8513 - protein, 8 aa, synthetic construct
VVFDMGFE

SEQ ID NO: 8514 - protein, 8 aa, synthetic construct
VQFNELFY

SEQ ID NO: 8515 - protein, 10 aa, synthetic construct
TCLKALVGLV

SEQ ID NO: 8516 - protein, 9 aa, synthetic construct
TGISASSIS

SEQ ID NO: 8517 - protein, 9 aa, synthetic construct
TTFVHPWFR

SEQ ID NO: 8518 - protein, 11 aa, synthetic construct
VQVNTMIMIFR

SEQ ID NO: 8519 - protein, 9 aa, synthetic construct
VVYRMGGFN

SEQ ID NO: 8520 - protein, 12 aa, synthetic construct
TLLVVHDGVLVL

SEQ ID NO: 8521 - protein, 10 aa, synthetic construct
KIGFIDWIVC

SEQ ID NO: 8522 - protein, 10 aa, synthetic construct
TVYDSDDGFY

SEQ ID NO: 8523 - protein, 9 aa, synthetic construct
TVLKLGTFL

SEQ ID NO: 8524 - protein, 10 aa, synthetic construct
VSINLLGRIR

SEQ ID NO: 8525 - protein, 9 aa, synthetic construct
TCMYTGGFS

SEQ ID NO: 8526 - protein, 13 aa, synthetic construct
SGIMIHCTFLSVV

SEQ ID NO: 8527 - protein, 10 aa, synthetic construct
VRIRRDGLID

SEQ ID NO: 8528 - protein, 11 aa, synthetic construct
ACVHAPIWNVR

SEQ ID NO: 8529 - protein, 8 aa, synthetic construct
VIWRGGKL

SEQ ID NO: 8530 - protein, 8 aa, synthetic construct
VAIEDTFR

SEQ ID NO: 8531 - protein, 9 aa, synthetic construct
VSVVKGAFK

SEQ ID NO: 8532 - protein, 6 aa, synthetic construct
VNNRIR

SEQ ID NO: 8533 - protein, 8 aa, synthetic construct
VGLASRFL

SEQ ID NO: 8534 - protein, 10 aa, synthetic construct
DCLGLEGHLI

SEQ ID NO: 8535 - protein, 9 aa, synthetic construct
TALGVRVFM

SEQ ID NO: 8536 - protein, 8 aa, synthetic construct
VILTTLFS

SEQ ID NO: 8537 - protein, 10 aa, synthetic construct
MTWLPHSHFE

SEQ ID NO: 8538 - protein, 9 aa, synthetic construct
FIFKMRGAH

SEQ ID NO: 8539 - protein, 11 aa, synthetic construct
TVVNFTQFRFD

SEQ ID NO: 8540 - protein, 9 aa, synthetic construct
TIIGSLAFR

SEQ ID NO: 8541 - protein, 8 aa, synthetic construct
WISNGGFR

SEQ ID NO: 8542 - protein, 8 aa, synthetic construct
TVFSTTFR

SEQ ID NO: 8543 - protein, 9 aa, synthetic construct
GRRVRMDWW

SEQ ID NO: 8544 - protein, 6 aa, synthetic construct
ISLRIR

SEQ ID NO: 8545 - protein, 10 aa, synthetic construct
TALDSRGPFT

SEQ ID NO: 8546 - protein, 8 aa, synthetic construct
TYWFGGFV

SEQ ID NO: 8547 - protein, 8 aa, synthetic construct
TLVSMVIM

SEQ ID NO: 8548 - protein, 13 aa, synthetic construct
TKVLVEGGIIDIH

SEQ ID NO: 8549 - protein, 8 aa, synthetic construct
TTFVTVFE

SEQ ID NO: 8550 - protein, 13 aa, synthetic construct
VGLVRSINGTMLV

SEQ ID NO: 8551 - protein, 8 aa, synthetic construct
TIFDILFR

SEQ ID NO: 8552 - protein, 8 aa, synthetic construct
VVIRRVFV

SEQ ID NO: 8553 - protein, 11 aa, synthetic construct
VSVLGFQMVMR

SEQ ID NO: 8554 - protein, 9 aa, synthetic construct
LTWTHGSCT

SEQ ID NO: 8555 - protein, 13 aa, synthetic construct
TLLVLSNSAFRVL

SEQ ID NO: 8556 - protein, 10 aa, synthetic construct
VGLVAFAGFV

SEQ ID NO: 8557 - protein, 9 aa, synthetic construct
TSCVGVHFK

SEQ ID NO: 8558 - protein, 9 aa, synthetic construct
TSILRGLIK

SEQ ID NO: 8559 - protein, 8 aa, synthetic construct
TRLVRHKT

SEQ ID NO: 8560 - protein, 10 aa, synthetic construct
TIWGPSVGFL

SEQ ID NO: 8561 - protein, 8 aa, synthetic construct
TYLVVAFL

SEQ ID NO: 8562 - protein, 10 aa, synthetic construct
SGMRPGFMLR

SEQ ID NO: 8563 - protein, 8 aa, synthetic construct
SVCVTAFR

SEQ ID NO: 8564 - protein, 13 aa, synthetic construct
LVWAAEIGVRVFR

SEQ ID NO: 8565 - protein, 6 aa, synthetic construct
FFLNMH

SEQ ID NO: 8566 - protein, 8 aa, synthetic construct
TVLDRRFF

SEQ ID NO: 8567 - protein, 10 aa, synthetic construct
TTFDVHDFFE

SEQ ID NO: 8568 - protein, 8 aa, synthetic construct
TTFKDGFV

SEQ ID NO: 8569 - protein, 9 aa, synthetic construct
LIVNTSHVR

SEQ ID NO: 8570 - protein, 11 aa, synthetic construct
DRVNERFVQHV

SEQ ID NO: 8571 - protein, 9 aa, synthetic construct
ILIRVHMFR

SEQ ID NO: 8572 - protein, 11 aa, synthetic construct
TTMCHSNHRFM

SEQ ID NO: 8573 - protein, 8 aa, synthetic construct
VVLRRVFI

SEQ ID NO: 8574 - protein, 10 aa, synthetic construct
TVWSMQRLFS

SEQ ID NO: 8575 - protein, 9 aa, synthetic construct
TAVALAKFC

SEQ ID NO: 8576 - protein, 8 aa, synthetic construct
VVVTHEFV

SEQ ID NO: 8577 - protein, 9 aa, synthetic construct
SCFDVMGVR

SEQ ID NO: 8578 - protein, 14 aa, synthetic construct
TLWTMLVRVAARLC

SEQ ID NO: 8579 - protein, 9 aa, synthetic construct
TVFSSHVFY

SEQ ID NO: 8580 - protein, 9 aa, synthetic construct
VVVGRTMFK

SEQ ID NO: 8581 - protein, 9 aa, synthetic construct
TALVKNVFC

SEQ ID NO: 8582 - protein, 13 aa, synthetic construct
TCWGGVVSDIPFR

SEQ ID NO: 8583 - protein, 9 aa, synthetic construct
LVIDRYTFH

SEQ ID NO: 8584 - protein, 11 aa, synthetic construct
SCFIMAVQEFV

SEQ ID NO: 8585 - protein, 10 aa, synthetic construct
IRLSAIFGFM

SEQ ID NO: 8586 - protein, 9 aa, synthetic construct
SMLHVGLLV

SEQ ID NO: 8587 - protein, 9 aa, synthetic construct
GGFVDGRFR

SEQ ID NO: 8588 - protein, 9 aa, synthetic construct
TVVGSMRIM

SEQ ID NO: 8589 - protein, 9 aa, synthetic construct
TSVSNVGFH

SEQ ID NO: 8590 - protein, 10 aa, synthetic construct
TWLDETYRKR

SEQ ID NO: 8591 - protein, 9 aa, synthetic construct
TVLEAIHFI

SEQ ID NO: 8592 - protein, 9 aa, synthetic construct
SSFFAPRLY

SEQ ID NO: 8593 - protein, 9 aa, synthetic construct
TTLFNATFF

SEQ ID NO: 8594 - protein, 10 aa, synthetic construct
VMMSTDGRFN

SEQ ID NO: 8595 - protein, 10 aa, synthetic construct
VEWGNVGGFK

SEQ ID NO: 8596 - protein, 12 aa, synthetic construct
VVLDGVDRMGFR

SEQ ID NO: 8597 - protein, 8 aa, synthetic construct
VTVEWMVK

SEQ ID NO: 8598 - protein, 8 aa, synthetic construct
MWGVHVMF

SEQ ID NO: 8599 - protein, 10 aa, synthetic construct
WDYVVTRGFV

SEQ ID NO: 8600 - protein, 9 aa, synthetic construct
TVVRCNRIS

SEQ ID NO: 8601 - protein, 10 aa, synthetic construct
TGVSPGCGFR

SEQ ID NO: 8602 - protein, 9 aa, synthetic construct
SQLGSHGFV

SEQ ID NO: 8603 - protein, 8 aa, synthetic construct
SVMSRGIR

SEQ ID NO: 8604 - protein, 9 aa, synthetic construct
TVIVVNGFG

SEQ ID NO: 8605 - protein, 9 aa, synthetic construct
VCFTSRGFN

SEQ ID NO: 8606 - protein, 13 aa, synthetic construct
EGLRRAVDRWSFV

SEQ ID NO: 8607 - protein, 10 aa, synthetic construct
TGFGVASRWI

SEQ ID NO: 8608 - protein, 9 aa, synthetic construct
TTYNFHGFK

SEQ ID NO: 8609 - protein, 8 aa, synthetic construct
TVFRGELT

SEQ ID NO: 8610 - protein, 9 aa, synthetic construct
ASIANTFFV

SEQ ID NO: 8611 - protein, 11 aa, synthetic construct
TVVIVDKGTVV

SEQ ID NO: 8612 - protein, 11 aa, synthetic construct
VTFCAKSGKIL

SEQ ID NO: 8613 - protein, 13 aa, synthetic construct
VEAYMSQDGYAFI

SEQ ID NO: 8614 - protein, 12 aa, synthetic construct
TLLDVQGTRALR

SEQ ID NO: 8615 - protein, 11 aa, synthetic construct
TCWKQSGWRFV

SEQ ID NO: 8616 - protein, 9 aa, synthetic construct
TTVTNFHFF

SEQ ID NO: 8617 - protein, 8 aa, synthetic construct
TAITNKFV

SEQ ID NO: 8618 - protein, 14 aa, synthetic construct
TDIFLQSSSNLVFR

SEQ ID NO: 8619 - protein, 7 aa, synthetic construct
LIMGDMF

SEQ ID NO: 8620 - protein, 6 aa, synthetic construct
LSMCLR

SEQ ID NO: 8621 - protein, 8 aa, synthetic construct
LAFNRVFC

SEQ ID NO: 8622 - protein, 11 aa, synthetic construct
LVVIGIKFAIR

SEQ ID NO: 8623 - protein, 13 aa, synthetic construct
VRSWVYWCCGLMD

SEQ ID NO: 8624 - protein, 11 aa, synthetic construct
TILSCVHNRIG

SEQ ID NO: 8625 - protein, 10 aa, synthetic construct
DILPGGGLIE

SEQ ID NO: 8626 - protein, 9 aa, synthetic construct
LTVHGMRVE

SEQ ID NO: 8627 - protein, 10 aa, synthetic construct
VTVSRDAGFI

SEQ ID NO: 8628 - protein, 9 aa, synthetic construct
LSVQADGIR

SEQ ID NO: 8629 - protein, 10 aa, synthetic construct
VLMKTDFDLI

SEQ ID NO: 8630 - protein, 9 aa, synthetic construct
TKFKDLRFV

SEQ ID NO: 8631 - protein, 12 aa, synthetic construct
TAISYDVRPFFD

SEQ ID NO: 8632 - protein, 9 aa, synthetic construct
IVAGIWEDG

SEQ ID NO: 8633 - protein, 9 aa, synthetic construct
TAVVRWGII

SEQ ID NO: 8634 - protein, 10 aa, synthetic construct
VECGVNIRFT

SEQ ID NO: 8635 - protein, 6 aa, synthetic construct
TSIPKR

SEQ ID NO: 8636 - protein, 9 aa, synthetic construct
VGFLARLFR

SEQ ID NO: 8637 - protein, 10 aa, synthetic construct
TVVSGDYMFS

SEQ ID NO: 8638 - protein, 9 aa, synthetic construct
TMFSVRKFI

SEQ ID NO: 8639 - protein, 9 aa, synthetic construct
TSFSAMSFG

SEQ ID NO: 8640 - protein, 9 aa, synthetic construct
VALGKASIV

SEQ ID NO: 8641 - protein, 5 aa, synthetic construct
RNCRE

SEQ ID NO: 8642 - protein, 6 aa, synthetic construct
TGVTFR

SEQ ID NO: 8643 - protein, 9 aa, synthetic construct
RTRAGMGCD

SEQ ID NO: 8644 - protein, 8 aa, synthetic construct
VLFWAVLA

SEQ ID NO: 8645 - protein, 7 aa, synthetic construct
LGVADLD

SEQ ID NO: 8646 - protein, 9 aa, synthetic construct
VSLVFSNFV

SEQ ID NO: 8647 - protein, 10 aa, synthetic construct
TGLLRDCSFV

SEQ ID NO: 8648 - protein, 13 aa, synthetic construct
SRLRVFEADMKIE

SEQ ID NO: 8649 - protein, 11 aa, synthetic construct
TVWAEDFRRVW

SEQ ID NO: 8650 - protein, 9 aa, synthetic construct
VICITGFFM

SEQ ID NO: 8651 - protein, 13 aa, synthetic construct
TVIHGQGMWAHFT

SEQ ID NO: 8652 - protein, 13 aa, synthetic construct
VHMVHVGVRIVFG

SEQ ID NO: 8653 - protein, 10 aa, synthetic construct
VVLGVQSGFQ

SEQ ID NO: 8654 - protein, 11 aa, synthetic construct
MVGETGITLVT

SEQ ID NO: 8655 - protein, 9 aa, synthetic construct
VILQSRAFI

SEQ ID NO: 8656 - protein, 9 aa, synthetic construct
SVFDLGRFG

SEQ ID NO: 8657 - protein, 12 aa, synthetic construct
VPKWVIGPGVQF

SEQ ID NO: 8658 - protein, 10 aa, synthetic construct
TGVIGVRGFV

SEQ ID NO: 8659 - protein, 6 aa, synthetic construct
LLTTCR

SEQ ID NO: 8660 - protein, 9 aa, synthetic construct
TAFKEAGFL

SEQ ID NO: 8661 - protein, 6 aa, synthetic construct
KTFRDV

SEQ ID NO: 8662 - protein, 9 aa, synthetic construct
VGLKEFMFL

SEQ ID NO: 8663 - protein, 9 aa, synthetic construct
TAFGYARFY

SEQ ID NO: 8664 - protein, 10 aa, synthetic construct
AAITEGWRLQ

SEQ ID NO: 8665 - protein, 8 aa, synthetic construct
TAVTILIW

SEQ ID NO: 8666 - protein, 8 aa, synthetic construct
DVPVDVLG

SEQ ID NO: 8667 - protein, 10 aa, synthetic construct
TCQKATGSFY

SEQ ID NO: 8668 - protein, 10 aa, synthetic construct
TTLVIAGWLE

SEQ ID NO: 8669 - protein, 12 aa, synthetic construct
GRVLPTAYVDIM

SEQ ID NO: 8670 - protein, 10 aa, synthetic construct
TVFIDLKGIN

SEQ ID NO: 8671 - protein, 10 aa, synthetic construct
TTWDVVEGFG

SEQ ID NO: 8672 - protein, 6 aa, synthetic construct
TTTHFV

SEQ ID NO: 8673 - protein, 9 aa, synthetic construct
TALTTVNFR

SEQ ID NO: 8674 - protein, 9 aa, synthetic construct
VLWLATGFG

SEQ ID NO: 8675 - protein, 10 aa, synthetic construct
VEVSRTMLLR

SEQ ID NO: 8676 - protein, 11 aa, synthetic construct
THWGYLVGRFT

SEQ ID NO: 8677 - protein, 9 aa, synthetic construct
TACDAMGFD

SEQ ID NO: 8678 - protein, 9 aa, synthetic construct
VHVHMGTFI

SEQ ID NO: 8679 - protein, 7 aa, synthetic construct
GEDNRVV

SEQ ID NO: 8680 - protein, 10 aa, synthetic construct
TVFYVVMGIG

SEQ ID NO: 8681 - protein, 8 aa, synthetic construct
EPYDVFEP

SEQ ID NO: 8682 - protein, 10 aa, synthetic construct
TIFSDVGIKI

SEQ ID NO: 8683 - protein, 10 aa, synthetic construct
FVLAHGRGGV

SEQ ID NO: 8684 - protein, 8 aa, synthetic construct
VSVLAKFR

SEQ ID NO: 8685 - protein, 9 aa, synthetic construct
LRVEFGSIA

SEQ ID NO: 8686 - protein, 9 aa, synthetic construct
VTNVNVGFV

SEQ ID NO: 8687 - protein, 9 aa, synthetic construct
TCIVAVLVR

SEQ ID NO: 8688 - protein, 9 aa, synthetic construct
TNFHRYRIV

SEQ ID NO: 8689 - protein, 9 aa, synthetic construct
TVVGVREFV

SEQ ID NO: 8690 - protein, 10 aa, synthetic construct
TTFLKDVGFI

SEQ ID NO: 8691 - protein, 10 aa, synthetic construct
TELVMHRCLV

SEQ ID NO: 8692 - protein, 9 aa, synthetic construct
SALGFDGFC

SEQ ID NO: 8693 - protein, 7 aa, synthetic construct
LVLAGWC

SEQ ID NO: 8694 - protein, 11 aa, synthetic construct
TAFNWVDGFFC

SEQ ID NO: 8695 - protein, 8 aa, synthetic construct
TTISHNVN

SEQ ID NO: 8696 - protein, 9 aa, synthetic construct
TCLDFRLLV

SEQ ID NO: 8697 - protein, 10 aa, synthetic construct
TLFDPHIGKA

SEQ ID NO: 8698 - protein, 8 aa, synthetic construct
NVWCRGME

SEQ ID NO: 8699 - protein, 9 aa, synthetic construct
TILDIRGFQ

SEQ ID NO: 8700 - protein, 10 aa, synthetic construct
TGVHCIWGIV

SEQ ID NO: 8701 - protein, 10 aa, synthetic construct
VVIMDGMTFI

SEQ ID NO: 8702 - protein, 8 aa, synthetic construct
TYVIRGIQ

SEQ ID NO: 8703 - protein, 7 aa, synthetic construct
LVSAGII

SEQ ID NO: 8704 - protein, 10 aa, synthetic construct
ADDMGRNAVW

SEQ ID NO: 8705 - protein, 9 aa, synthetic construct
TTWQDGLFG

SEQ ID NO: 8706 - protein, 9 aa, synthetic construct
TCLAGNVLV

SEQ ID NO: 8707 - protein, 6 aa, synthetic construct
VPVVDV

SEQ ID NO: 8708 - protein, 9 aa, synthetic construct
TLGRFGKFV

SEQ ID NO: 8709 - protein, 7 aa, synthetic construct
LIFRHWI

SEQ ID NO: 8710 - protein, 10 aa, synthetic construct
THFDVRIGVR

SEQ ID NO: 8711 - protein, 9 aa, synthetic construct
VGFLVGAVI

SEQ ID NO: 8712 - protein, 9 aa, synthetic construct
CALSVCGFV

SEQ ID NO: 8713 - protein, 10 aa, synthetic construct
TGLSCNYSFM

SEQ ID NO: 8714 - protein, 6 aa, synthetic construct
VTDRIV

SEQ ID NO: 8715 - protein, 9 aa, synthetic construct
TVLGDGSFI

SEQ ID NO: 8716 - protein, 6 aa, synthetic construct
TSDRFF

SEQ ID NO: 8717 - protein, 9 aa, synthetic construct
TALSISGRH

SEQ ID NO: 8718 - protein, 12 aa, synthetic construct
MVVFEMVSWTIR

SEQ ID NO: 8719 - protein, 10 aa, synthetic construct
TSMTPLGRVR

SEQ ID NO: 8720 - protein, 12 aa, synthetic construct
IDVSVVGQIIQD

SEQ ID NO: 8721 - protein, 12 aa, synthetic construct
TGWYNNLVPAFR

SEQ ID NO: 8722 - protein, 8 aa, synthetic construct
TVLWVGVR

SEQ ID NO: 8723 - protein, 11 aa, synthetic construct
TGVARYRGTIS

SEQ ID NO: 8724 - protein, 8 aa, synthetic construct
VMYINVFI

SEQ ID NO: 8725 - protein, 8 aa, synthetic construct
TISNRGFS

SEQ ID NO: 8726 - protein, 9 aa, synthetic construct
GNWVRQGYM

SEQ ID NO: 8727 - protein, 9 aa, synthetic construct
CAVSVHDFK

SEQ ID NO: 8728 - protein, 6 aa, synthetic construct
LMWSWV

SEQ ID NO: 8729 - protein, 13 aa, synthetic construct
VFAVMREKLVWFT

SEQ ID NO: 8730 - protein, 9 aa, synthetic construct
TSLGIRNFD

SEQ ID NO: 8731 - protein, 6 aa, synthetic construct
TTEVFI

SEQ ID NO: 8732 - protein, 9 aa, synthetic construct
TMHVRSRFL

SEQ ID NO: 8733 - protein, 10 aa, synthetic construct
TVVRPVPGFQ

SEQ ID NO: 8734 - protein, 8 aa, synthetic construct
WVFVRGFL

SEQ ID NO: 8735 - protein, 9 aa, synthetic construct
TSMWRVTVM

SEQ ID NO: 8736 - protein, 8 aa, synthetic construct
TQFEGRKI

SEQ ID NO: 8737 - protein, 11 aa, synthetic construct
VVIDQARWAFL

SEQ ID NO: 8738 - protein, 10 aa, synthetic construct
LVVLGTGMIV

SEQ ID NO: 8739 - protein, 9 aa, synthetic construct
CTFTKHDFL

SEQ ID NO: 8740 - protein, 9 aa, synthetic construct
TLIYGQKFE

SEQ ID NO: 8741 - protein, 6 aa, synthetic construct
TSGEFK

SEQ ID NO: 8742 - protein, 8 aa, synthetic construct
MIFASTFE

SEQ ID NO: 8743 - protein, 6 aa, synthetic construct
LDKKWN

SEQ ID NO: 8744 - protein, 8 aa, synthetic construct
VGLRAPKV

SEQ ID NO: 8745 - protein, 7 aa, synthetic construct
VSVDRFL

SEQ ID NO: 8746 - protein, 13 aa, synthetic construct
SVWVNGNMSRGIR

SEQ ID NO: 8747 - protein, 10 aa, synthetic construct
TELLRMEGIH

SEQ ID NO: 8748 - protein, 10 aa, synthetic construct
TEHLSRVHKW

SEQ ID NO: 8749 - protein, 8 aa, synthetic construct
LLITRVWR

SEQ ID NO: 8750 - protein, 9 aa, synthetic construct
TMWSGVAFS

SEQ ID NO: 8751 - protein, 14 aa, synthetic construct
KGFCSLYDMSAGWQ

SEQ ID NO: 8752 - protein, 9 aa, synthetic construct
TTHVGRGFQ

SEQ ID NO: 8753 - protein, 14 aa, synthetic construct
VWVVVIKGIIFHMI

SEQ ID NO: 8754 - protein, 10 aa, synthetic construct
TAFVDGVYLF

SEQ ID NO: 8755 - protein, 8 aa, synthetic construct
VYFAGRFI

SEQ ID NO: 8756 - protein, 14 aa, synthetic construct
TVVTVADGKQVALK

SEQ ID NO: 8757 - protein, 9 aa, synthetic construct
TVHHLACFR

SEQ ID NO: 8758 - protein, 9 aa, synthetic construct
TVFGGMLKS

SEQ ID NO: 8759 - protein, 8 aa, synthetic construct
CWGTIGLG

SEQ ID NO: 8760 - protein, 9 aa, synthetic construct
TVCMHMGFG

SEQ ID NO: 8761 - protein, 9 aa, synthetic construct
TCLVNMSRD

SEQ ID NO: 8762 - protein, 9 aa, synthetic construct
TVVNLNGIR

SEQ ID NO: 8763 - protein, 10 aa, synthetic construct
CSVDPVDGFR

SEQ ID NO: 8764 - protein, 10 aa, synthetic construct
VVLGRQGRFL

SEQ ID NO: 8765 - protein, 10 aa, synthetic construct
FCFVRGRGGI

SEQ ID NO: 8766 - protein, 11 aa, synthetic construct
GPGLEGFTMGG

SEQ ID NO: 8767 - protein, 9 aa, synthetic construct
TVVGSCWIR

SEQ ID NO: 8768 - protein, 8 aa, synthetic construct
TFYVVVFG

SEQ ID NO: 8769 - protein, 10 aa, synthetic construct
VIVTTGRRFL

SEQ ID NO: 8770 - protein, 13 aa, synthetic construct
TSLVHSCGSLELG

SEQ ID NO: 8771 - protein, 11 aa, synthetic construct
TVFSKRVLAFE

SEQ ID NO: 8772 - protein, 13 aa, synthetic construct
TNVLRKNGLLYFM

SEQ ID NO: 8773 - protein, 10 aa, synthetic construct
TMVRRDFTFV

SEQ ID NO: 8774 - protein, 9 aa, synthetic construct
TCMGGNRFR

SEQ ID NO: 8775 - protein, 8 aa, synthetic construct
TGFLNGFC

SEQ ID NO: 8776 - protein, 10 aa, synthetic construct
TSLMDSHRFT

SEQ ID NO: 8777 - protein, 10 aa, synthetic construct
WVIDSNTRFG

SEQ ID NO: 8778 - protein, 9 aa, synthetic construct
TMLCCGFLY

SEQ ID NO: 8779 - protein, 8 aa, synthetic construct
TVFRSVFI

SEQ ID NO: 8780 - protein, 9 aa, synthetic construct
VSYTRRGFD

SEQ ID NO: 8781 - protein, 9 aa, synthetic construct
WTIITHRLC

SEQ ID NO: 8782 - protein, 10 aa, synthetic construct
GDSLMGGPRL

SEQ ID NO: 8783 - protein, 9 aa, synthetic construct
THLPDGRRR

SEQ ID NO: 8784 - protein, 8 aa, synthetic construct
TVLSSPKK

SEQ ID NO: 8785 - protein, 9 aa, synthetic construct
TEFRSIRFV

SEQ ID NO: 8786 - protein, 10 aa, synthetic construct
SFFGLRNAYV

SEQ ID NO: 8787 - protein, 13 aa, synthetic construct
LVVFDHVVRQRFM

SEQ ID NO: 8788 - protein, 8 aa, synthetic construct
WVFEGSFK

SEQ ID NO: 8789 - protein, 12 aa, synthetic construct
TAFRHVGVRGRI

SEQ ID NO: 8790 - protein, 9 aa, synthetic construct
SVIRSYLLN

SEQ ID NO: 8791 - protein, 9 aa, synthetic construct
LGLEATVVL

SEQ ID NO: 8792 - protein, 10 aa, synthetic construct
TALMPNRLFG

SEQ ID NO: 8793 - protein, 10 aa, synthetic construct
DIWLGLPGMA

SEQ ID NO: 8794 - protein, 9 aa, synthetic construct
VFVMSPTFR

SEQ ID NO: 8795 - protein, 10 aa, synthetic construct
TNWAILGGFS

SEQ ID NO: 8796 - protein, 9 aa, synthetic construct
VRLVRGLFS

SEQ ID NO: 8797 - protein, 11 aa, synthetic construct
TCVRLALLTFV

SEQ ID NO: 8798 - protein, 13 aa, synthetic construct
TSLIRVRCVARLV

SEQ ID NO: 8799 - protein, 10 aa, synthetic construct
SHIGHMGHLS

SEQ ID NO: 8800 - protein, 6 aa, synthetic construct
TTLRWV

SEQ ID NO: 8801 - protein, 8 aa, synthetic construct
TVVGDGIL

SEQ ID NO: 8802 - protein, 13 aa, synthetic construct
SVIRIGQDSFMLV

SEQ ID NO: 8803 - protein, 13 aa, synthetic construct
TELMRARTCVMFK

SEQ ID NO: 8804 - protein, 12 aa, synthetic construct
LMLRDGWFTKFS

SEQ ID NO: 8805 - protein, 9 aa, synthetic construct
TGIVPGSFI

SEQ ID NO: 8806 - protein, 9 aa, synthetic construct
TVCMHGRFG

SEQ ID NO: 8807 - protein, 9 aa, synthetic construct
VLFRGNQIG

SEQ ID NO: 8808 - protein, 11 aa, synthetic construct
TSINVVNRVFI

SEQ ID NO: 8809 - protein, 7 aa, synthetic construct
EHASRVV

SEQ ID NO: 8810 - protein, 9 aa, synthetic construct
VSFGNFGKH

SEQ ID NO: 8811 - protein, 9 aa, synthetic construct
VVFNGKGFM

SEQ ID NO: 8812 - protein, 9 aa, synthetic construct
VRGVSWTVN

SEQ ID NO: 8813 - protein, 9 aa, synthetic construct
VGASLSEME

SEQ ID NO: 8814 - protein, 9 aa, synthetic construct
TIWKIMLFV

SEQ ID NO: 8815 - protein, 9 aa, synthetic construct
TTINRGVIA

SEQ ID NO: 8816 - protein, 9 aa, synthetic construct
TQHIFNRFV

SEQ ID NO: 8817 - protein, 6 aa, synthetic construct
TLRNFN

SEQ ID NO: 8818 - protein, 8 aa, synthetic construct
TVFRVVFS

SEQ ID NO: 8819 - protein, 7 aa, synthetic construct
LVLEGWI

SEQ ID NO: 8820 - protein, 9 aa, synthetic construct
TCVIDMGIK

SEQ ID NO: 8821 - protein, 9 aa, synthetic construct
TIVVDRRFL

SEQ ID NO: 8822 - protein, 10 aa, synthetic construct
TVMDVRHGMR

SEQ ID NO: 8823 - protein, 11 aa, synthetic construct
DDLDQVVGRLR

SEQ ID NO: 8824 - protein, 10 aa, synthetic construct
VNFVLGIGFS

SEQ ID NO: 8825 - protein, 12 aa, synthetic construct
TGLLLDLGRRFM

SEQ ID NO: 8826 - protein, 11 aa, synthetic construct
GSSQVARLDLE

SEQ ID NO: 8827 - protein, 12 aa, synthetic construct
TTFHYSRARWVT

SEQ ID NO: 8828 - protein, 14 aa, synthetic construct
VELVRGDRGLSRLF

SEQ ID NO: 8829 - protein, 8 aa, synthetic construct
SELFRYLK

SEQ ID NO: 8830 - protein, 8 aa, synthetic construct
VDYTRGTH

SEQ ID NO: 8831 - protein, 13 aa, synthetic construct
TRLRWTSARYRFA

SEQ ID NO: 8832 - protein, 8 aa, synthetic construct
GRVTCIGT

SEQ ID NO: 8833 - protein, 8 aa, synthetic construct
VRVSGRFL

SEQ ID NO: 8834 - protein, 13 aa, synthetic construct
TTVAVRSLKVVVT

SEQ ID NO: 8835 - protein, 9 aa, synthetic construct
TVVAIYSFG

SEQ ID NO: 8836 - protein, 6 aa, synthetic construct
TTVVMM

SEQ ID NO: 8837 - protein, 9 aa, synthetic construct
SRLEEGLIV

SEQ ID NO: 8838 - protein, 9 aa, synthetic construct
WVWNGTGFK

SEQ ID NO: 8839 - protein, 12 aa, synthetic construct
TIIPMVITRSFY

SEQ ID NO: 8840 - protein, 8 aa, synthetic construct
TVYIGSFV

SEQ ID NO: 8841 - protein, 6 aa, synthetic construct
TKIDFL

SEQ ID NO: 8842 - protein, 10 aa, synthetic construct
TVLDAERGFG

SEQ ID NO: 8843 - protein, 9 aa, synthetic construct
TSLGGSGFL

SEQ ID NO: 8844 - protein, 9 aa, synthetic construct
TVHEENKFI

SEQ ID NO: 8845 - protein, 6 aa, synthetic construct
LTGQWC

SEQ ID NO: 8846 - protein, 11 aa, synthetic construct
TVLGAVRRGFS

SEQ ID NO: 8847 - protein, 6 aa, synthetic construct
VSSRIV

SEQ ID NO: 8848 - protein, 8 aa, synthetic construct
TSFRRGFV

SEQ ID NO: 8849 - protein, 8 aa, synthetic construct
AETAFRGD

SEQ ID NO: 8850 - protein, 9 aa, synthetic construct
TTIRTRQFL

SEQ ID NO: 8851 - protein, 8 aa, synthetic construct
TALDLVFF

SEQ ID NO: 8852 - protein, 9 aa, synthetic construct
TSFKTDWFC

SEQ ID NO: 8853 - protein, 9 aa, synthetic construct
TAVYRGMFK

SEQ ID NO: 8854 - protein, 10 aa, synthetic construct
VFVIIGHGFV

SEQ ID NO: 8855 - protein, 13 aa, synthetic construct
TTMQYLGDGIGKN

SEQ ID NO: 8856 - protein, 10 aa, synthetic construct
TTIIPRLNFR

SEQ ID NO: 8857 - protein, 10 aa, synthetic construct
TVAQLGLSFK

SEQ ID NO: 8858 - protein, 8 aa, synthetic construct
TSFKLGRL

SEQ ID NO: 8859 - protein, 13 aa, synthetic construct
NTVFRCQFQGLVM

SEQ ID NO: 8860 - protein, 10 aa, synthetic construct
TIFHLSARFI

SEQ ID NO: 8861 - protein, 10 aa, synthetic construct
SAMLPARLLR

SEQ ID NO: 8862 - protein, 8 aa, synthetic construct
VQWRGEKL

SEQ ID NO: 8863 - protein, 8 aa, synthetic construct
TYAMDTFH

SEQ ID NO: 8864 - protein, 10 aa, synthetic construct
TVWMESGVFR

SEQ ID NO: 8865 - protein, 13 aa, synthetic construct
TCLDVIGAVPVFR

SEQ ID NO: 8866 - protein, 8 aa, synthetic construct
TSFDKFVR

SEQ ID NO: 8867 - protein, 9 aa, synthetic construct
TSCIVGRFV

SEQ ID NO: 8868 - protein, 12 aa, synthetic construct
TVVTLRGVLVFE

SEQ ID NO: 8869 - protein, 9 aa, synthetic construct
DSLRGCTML

SEQ ID NO: 8870 - protein, 6 aa, synthetic construct
VSHRVR

SEQ ID NO: 8871 - protein, 10 aa, synthetic construct
VEVMVSNGFL

SEQ ID NO: 8872 - protein, 8 aa, synthetic construct
VIIAGIFM

SEQ ID NO: 8873 - protein, 9 aa, synthetic construct
VFVHRWRFV

SEQ ID NO: 8874 - protein, 7 aa, synthetic construct
VFRLWVG

SEQ ID NO: 8875 - protein, 11 aa, synthetic construct
TMFDGHRSAFF

SEQ ID NO: 8876 - protein, 12 aa, synthetic construct
LTRFLRELMGEV

SEQ ID NO: 8877 - protein, 9 aa, synthetic construct
VLCILCRFE

SEQ ID NO: 8878 - protein, 9 aa, synthetic construct
TRIVLVGFA

SEQ ID NO: 8879 - protein, 8 aa, synthetic construct
TVIIGLFR

SEQ ID NO: 8880 - protein, 10 aa, synthetic construct
VEITQIGRPV

SEQ ID NO: 8881 - protein, 9 aa, synthetic construct
TIFTGVVFM

SEQ ID NO: 8882 - protein, 10 aa, synthetic construct
SDLGNLCRIK

SEQ ID NO: 8883 - protein, 10 aa, synthetic construct
TRYGIDLIFD

SEQ ID NO: 8884 - protein, 11 aa, synthetic construct
TCLERNIVAFR

SEQ ID NO: 8885 - protein, 8 aa, synthetic construct
VGITISFV

SEQ ID NO: 8886 - protein, 9 aa, synthetic construct
FGDGGMSGA

SEQ ID NO: 8887 - protein, 10 aa, synthetic construct
TRIMDLRWVE

SEQ ID NO: 8888 - protein, 11 aa, synthetic construct
TTHRIGQHFFG

SEQ ID NO: 8889 - protein, 10 aa, synthetic construct
TMLRAGVALV

SEQ ID NO: 8890 - protein, 10 aa, synthetic construct
VCLDSTLRFN

SEQ ID NO: 8891 - protein, 11 aa, synthetic construct
VVIAVNGFTFE

SEQ ID NO: 8892 - protein, 6 aa, synthetic construct
TMVNFR

SEQ ID NO: 8893 - protein, 10 aa, synthetic construct
TVSVERGGFV

SEQ ID NO: 8894 - protein, 11 aa, synthetic construct
TGWCVRKMLFH

SEQ ID NO: 8895 - protein, 7 aa, synthetic construct
LSLCDWK

SEQ ID NO: 8896 - protein, 9 aa, synthetic construct
VLAVGIRFL

SEQ ID NO: 8897 - protein, 9 aa, synthetic construct
TTFVVWGRV

SEQ ID NO: 8898 - protein, 8 aa, synthetic construct
TVIANRLF

SEQ ID NO: 8899 - protein, 9 aa, synthetic construct
YQVALAAIV

SEQ ID NO: 8900 - protein, 11 aa, synthetic construct
WFMCNASPFLA

SEQ ID NO: 8901 - protein, 9 aa, synthetic construct
TVLLDRGFD

SEQ ID NO: 8902 - protein, 13 aa, synthetic construct
TAVVSNNNFGVFR

SEQ ID NO: 8903 - protein, 9 aa, synthetic construct
WKVLIDGFR

SEQ ID NO: 8904 - protein, 9 aa, synthetic construct
SIVVSGGFM

SEQ ID NO: 8905 - protein, 9 aa, synthetic construct
TTIVEKAFK

SEQ ID NO: 8906 - protein, 9 aa, synthetic construct
VLFLRSYCR

SEQ ID NO: 8907 - protein, 9 aa, synthetic construct
VVLRSIRFC

SEQ ID NO: 8908 - protein, 8 aa, synthetic construct
TIITVMFM

SEQ ID NO: 8909 - protein, 9 aa, synthetic construct
CDGVARNVR

SEQ ID NO: 8910 - protein, 9 aa, synthetic construct
WILKGCRFI

SEQ ID NO: 8911 - protein, 8 aa, synthetic construct
TIYVRWFE

SEQ ID NO: 8912 - protein, 9 aa, synthetic construct
NGVAQNRLS

SEQ ID NO: 8913 - protein, 9 aa, synthetic construct
TLLRLSRFR

SEQ ID NO: 8914 - protein, 6 aa, synthetic construct
TDLMFV

SEQ ID NO: 8915 - protein, 9 aa, synthetic construct
TVFVLGNFI

SEQ ID NO: 8916 - protein, 10 aa, synthetic construct
CVVSSIAGFE

SEQ ID NO: 8917 - protein, 10 aa, synthetic construct
TTIIDWRIVI

SEQ ID NO: 8918 - protein, 8 aa, synthetic construct
LWMMGAWT

SEQ ID NO: 8919 - protein, 8 aa, synthetic construct
LDRNLGHD

SEQ ID NO: 8920 - protein, 11 aa, synthetic construct
TVFEYLRWGWL

SEQ ID NO: 8921 - protein, 12 aa, synthetic construct
VWVVADLVIPMG

SEQ ID NO: 8922 - protein, 9 aa, synthetic construct
VSFLDMRLC

SEQ ID NO: 8923 - protein, 10 aa, synthetic construct
TLLSVTRDFR

SEQ ID NO: 8924 - protein, 9 aa, synthetic construct
TQLNGCGFF

SEQ ID NO: 8925 - protein, 10 aa, synthetic construct
HLRTGVLMFV

SEQ ID NO: 8926 - protein, 8 aa, synthetic construct
TIVMMGFH

SEQ ID NO: 8927 - protein, 8 aa, synthetic construct
VICELRFK

SEQ ID NO: 8928 - protein, 12 aa, synthetic construct
MTVNIGINCMFR

SEQ ID NO: 8929 - protein, 9 aa, synthetic construct
VVVVGWAFL

SEQ ID NO: 8930 - protein, 6 aa, synthetic construct
TSVMFA

SEQ ID NO: 8931 - protein, 9 aa, synthetic construct
VNFGNVGFG

SEQ ID NO: 8932 - protein, 8 aa, synthetic construct
IIMADRFR

SEQ ID NO: 8933 - protein, 6 aa, synthetic construct
VSRWFD

SEQ ID NO: 8934 - protein, 10 aa, synthetic construct
VCLSSYGDFV

SEQ ID NO: 8935 - protein, 9 aa, synthetic construct
TVIGNQQFF

SEQ ID NO: 8936 - protein, 9 aa, synthetic construct
IAGVRLDIL

SEQ ID NO: 8937 - protein, 9 aa, synthetic construct
TVICGMGKV

SEQ ID NO: 8938 - protein, 9 aa, synthetic construct
VMFVLFMFA

SEQ ID NO: 8939 - protein, 10 aa, synthetic construct
STFKEGGAFG

SEQ ID NO: 8940 - protein, 13 aa, synthetic construct
TLAGVVSTRLVFF

SEQ ID NO: 8941 - protein, 10 aa, synthetic construct
VVVRVSYALV

SEQ ID NO: 8942 - protein, 13 aa, synthetic construct
TAVDYTRMGAFID

SEQ ID NO: 8943 - protein, 9 aa, synthetic construct
TNYVSIGFV

SEQ ID NO: 8944 - protein, 8 aa, synthetic construct
CTIDRMFR

SEQ ID NO: 8945 - protein, 7 aa, synthetic construct
VMQSTPL

SEQ ID NO: 8946 - protein, 11 aa, synthetic construct
SALIVMPCAKI

SEQ ID NO: 8947 - protein, 13 aa, synthetic construct
VVLMFPGLGAAFG

SEQ ID NO: 8948 - protein, 14 aa, synthetic construct
SSIDSNARDGILLR

SEQ ID NO: 8949 - protein, 14 aa, synthetic construct
SGILRSSDKYFRII

SEQ ID NO: 8950 - protein, 10 aa, synthetic construct
SVIGGNGAKT

SEQ ID NO: 8951 - protein, 9 aa, synthetic construct
TGLTNRGLL

SEQ ID NO: 8952 - protein, 11 aa, synthetic construct
GSNEIVDSGMI

SEQ ID NO: 8953 - protein, 12 aa, synthetic construct
TGVYVLQGHGFW

SEQ ID NO: 8954 - protein, 13 aa, synthetic construct
LGFKVSVHVCMFV

SEQ ID NO: 8955 - protein, 8 aa, synthetic construct
TVFGHGFQ

SEQ ID NO: 8956 - protein, 10 aa, synthetic construct
GTVDTVGTWR

SEQ ID NO: 8957 - protein, 14 aa, synthetic construct
LTTVSGDFQVFNRN

SEQ ID NO: 8958 - protein, 9 aa, synthetic construct
WITTNWEFR

SEQ ID NO: 8959 - protein, 8 aa, synthetic construct
TTFDGGIF

SEQ ID NO: 8960 - protein, 9 aa, synthetic construct
TVVREWAFD

SEQ ID NO: 8961 - protein, 13 aa, synthetic construct
TMIKKANDMMRFE

SEQ ID NO: 8962 - protein, 9 aa, synthetic construct
TAVAQKRFQ

SEQ ID NO: 8963 - protein, 9 aa, synthetic construct
TIVLHTGLV

SEQ ID NO: 8964 - protein, 10 aa, synthetic construct
SIVNKGGMFG

SEQ ID NO: 8965 - protein, 9 aa, synthetic construct
GWVRNVEHF

SEQ ID NO: 8966 - protein, 8 aa, synthetic construct
TGFRRVFS

SEQ ID NO: 8967 - protein, 8 aa, synthetic construct
TAWNILID

SEQ ID NO: 8968 - protein, 10 aa, synthetic construct
TIWDDVTGFF

SEQ ID NO: 8969 - protein, 10 aa, synthetic construct
AIIRVCTMFG

SEQ ID NO: 8970 - protein, 9 aa, synthetic construct
VDFTHGGKA

SEQ ID NO: 8971 - protein, 11 aa, synthetic construct
MSLIAATGVFS

SEQ ID NO: 8972 - protein, 10 aa, synthetic construct
MMYLETWVLK

SEQ ID NO: 8973 - protein, 13 aa, synthetic construct
SVLLVRHDVITIK

SEQ ID NO: 8974 - protein, 9 aa, synthetic construct
TVFAACGLD

SEQ ID NO: 8975 - protein, 6 aa, synthetic construct
TSIRCS

SEQ ID NO: 8976 - protein, 10 aa, synthetic construct
TALRTTSGFT

SEQ ID NO: 8977 - protein, 9 aa, synthetic construct
TYFMANSFW

SEQ ID NO: 8978 - protein, 11 aa, synthetic construct
TVLLVKEPYKY

SEQ ID NO: 8979 - protein, 9 aa, synthetic construct
TLVRARGFS

SEQ ID NO: 8980 - protein, 8 aa, synthetic construct
TVMSMSFI

SEQ ID NO: 8981 - protein, 9 aa, synthetic construct
TVFRFGRLS

SEQ ID NO: 8982 - protein, 9 aa, synthetic construct
TFLNGRGIS

SEQ ID NO: 8983 - protein, 10 aa, synthetic construct
VRYNRVAHFV

SEQ ID NO: 8984 - protein, 9 aa, synthetic construct
VTRASWDFL

SEQ ID NO: 8985 - protein, 12 aa, synthetic construct
TSWDSKSTAGFT

SEQ ID NO: 8986 - protein, 8 aa, synthetic construct
TIVLAGFW

SEQ ID NO: 8987 - protein, 10 aa, synthetic construct
IIISEEVGRM

SEQ ID NO: 8988 - protein, 9 aa, synthetic construct
TCVYGYALL

SEQ ID NO: 8989 - protein, 14 aa, synthetic construct
TCIGVNELMMLEFM

SEQ ID NO: 8990 - protein, 6 aa, synthetic construct
LMSTRT

SEQ ID NO: 8991 - protein, 12 aa, synthetic construct
TSIMVGASAVIM

SEQ ID NO: 8992 - protein, 11 aa, synthetic construct
TMFDVNTIFIK

SEQ ID NO: 8993 - protein, 9 aa, synthetic construct
WILCWLDGS

SEQ ID NO: 8994 - protein, 10 aa, synthetic construct
TVCGHAASFA

SEQ ID NO: 8995 - protein, 9 aa, synthetic construct
TVFGGKAFA

SEQ ID NO: 8996 - protein, 9 aa, synthetic construct
TVVTAFCFM

SEQ ID NO: 8997 - protein, 10 aa, synthetic construct
VVHTATDRFH

SEQ ID NO: 8998 - protein, 10 aa, synthetic construct
IVVSWSGLFV

SEQ ID NO: 8999 - protein, 11 aa, synthetic construct
SILDLRGARFL

SEQ ID NO: 9000 - protein, 9 aa, synthetic construct
TAFQSGRLY

SEQ ID NO: 9001 - protein, 8 aa, synthetic construct
TVKRTRFV

SEQ ID NO: 9002 - protein, 8 aa, synthetic construct
TAMHASKH

SEQ ID NO: 9003 - protein, 9 aa, synthetic construct
SVFDVWVFA

SEQ ID NO: 9004 - protein, 10 aa, synthetic construct
LVQTNQAMIR

SEQ ID NO: 9005 - protein, 8 aa, synthetic construct
VILRGTFL

SEQ ID NO: 9006 - protein, 8 aa, synthetic construct
TYWAREMV

SEQ ID NO: 9007 - protein, 9 aa, synthetic construct
TVLDNIRFS

SEQ ID NO: 9008 - protein, 10 aa, synthetic construct
TCLDARGAFG

SEQ ID NO: 9009 - protein, 9 aa, synthetic construct
ICIHVDRFV

SEQ ID NO: 9010 - protein, 12 aa, synthetic construct
TVFAGTGLVMFG

SEQ ID NO: 9011 - protein, 9 aa, synthetic construct
TSLGSMGKL

SEQ ID NO: 9012 - protein, 11 aa, synthetic construct
VGRSSERLGFR

SEQ ID NO: 9013 - protein, 9 aa, synthetic construct
TVVRRLNFH

SEQ ID NO: 9014 - protein, 6 aa, synthetic construct
TGYNFA

SEQ ID NO: 9015 - protein, 9 aa, synthetic construct
MGVREGEVT

SEQ ID NO: 9016 - protein, 8 aa, synthetic construct
TALGVMFV

SEQ ID NO: 9017 - protein, 8 aa, synthetic construct
SVHQVLIL

SEQ ID NO: 9018 - protein, 11 aa, synthetic construct
WTVAALSRQFH

SEQ ID NO: 9019 - protein, 8 aa, synthetic construct
STFQEVLV

SEQ ID NO: 9020 - protein, 13 aa, synthetic construct
TALERGSVMIQVR

SEQ ID NO: 9021 - protein, 13 aa, synthetic construct
VAVCTDLEGVTIR

SEQ ID NO: 9022 - protein, 9 aa, synthetic construct
VVITGGAFE

SEQ ID NO: 9023 - protein, 10 aa, synthetic construct
TRFDACGYFI

SEQ ID NO: 9024 - protein, 12 aa, synthetic construct
ETWCIGRSIVFI

SEQ ID NO: 9025 - protein, 12 aa, synthetic construct
THIDCEAVLHIM

SEQ ID NO: 9026 - protein, 14 aa, synthetic construct
TIIGHKGNGQMLIN

SEQ ID NO: 9027 - protein, 7 aa, synthetic construct
IDMGQWV

SEQ ID NO: 9028 - protein, 10 aa, synthetic construct
LVAGGDVVWR

SEQ ID NO: 9029 - protein, 10 aa, synthetic construct
SVLTPVTWVL

SEQ ID NO: 9030 - protein, 8 aa, synthetic construct
TRMMLRKE

SEQ ID NO: 9031 - protein, 9 aa, synthetic construct
TKLSMSLIA

SEQ ID NO: 9032 - protein, 9 aa, synthetic construct
VSVGVQSFG

SEQ ID NO: 9033 - protein, 8 aa, synthetic construct
TCIARRVA

SEQ ID NO: 9034 - protein, 9 aa, synthetic construct
TSRGLRGFT

SEQ ID NO: 9035 - protein, 8 aa, synthetic construct
TVLDMYAR

SEQ ID NO: 9036 - protein, 7 aa, synthetic construct
LKVSPIQ

SEQ ID NO: 9037 - protein, 9 aa, synthetic construct
TDLHQFGFV

SEQ ID NO: 9038 - protein, 9 aa, synthetic construct
TGIDRDGFW

SEQ ID NO: 9039 - protein, 8 aa, synthetic construct
FTPSLQFM

SEQ ID NO: 9040 - protein, 9 aa, synthetic construct
AAISCSGFV

SEQ ID NO: 9041 - protein, 11 aa, synthetic construct
VVLRFILRKFV

SEQ ID NO: 9042 - protein, 8 aa, synthetic construct
LGFFETSA

SEQ ID NO: 9043 - protein, 14 aa, synthetic construct
VVIVNDGTTIAGFR

SEQ ID NO: 9044 - protein, 9 aa, synthetic construct
LCVLEGRVL

SEQ ID NO: 9045 - protein, 9 aa, synthetic construct
ATVVDMKFR

SEQ ID NO: 9046 - protein, 6 aa, synthetic construct
EFLTVD

SEQ ID NO: 9047 - protein, 10 aa, synthetic construct
AVMDTVGVFW

SEQ ID NO: 9048 - protein, 12 aa, synthetic construct
IVLVRRDMIRFQ

SEQ ID NO: 9049 - protein, 6 aa, synthetic construct
LAFPWT

SEQ ID NO: 9050 - protein, 9 aa, synthetic construct
TTFNGFNFS

SEQ ID NO: 9051 - protein, 9 aa, synthetic construct
TQLRAMGFV

SEQ ID NO: 9052 - protein, 9 aa, synthetic construct
TAINRGMFN

SEQ ID NO: 9053 - protein, 10 aa, synthetic construct
TEWSRARMFE

SEQ ID NO: 9054 - protein, 7 aa, synthetic construct
LGISPIS

SEQ ID NO: 9055 - protein, 10 aa, synthetic construct
VVFGRRLGFR

SEQ ID NO: 9056 - protein, 10 aa, synthetic construct
SVIGIVKPLE

SEQ ID NO: 9057 - protein, 8 aa, synthetic construct
TAVTRGFV

SEQ ID NO: 9058 - protein, 8 aa, synthetic construct
TALGVRFS

SEQ ID NO: 9059 - protein, 9 aa, synthetic construct
TVVRVHRFV

SEQ ID NO: 9060 - protein, 10 aa, synthetic construct
TIWLVDAGFK

SEQ ID NO: 9061 - protein, 9 aa, synthetic construct
TMFLRMGFF

SEQ ID NO: 9062 - protein, 10 aa, synthetic construct
STFMHSAGKN

SEQ ID NO: 9063 - protein, 10 aa, synthetic construct
VLVNMTWFME

SEQ ID NO: 9064 - protein, 8 aa, synthetic construct
TILSAKLV

SEQ ID NO: 9065 - protein, 9 aa, synthetic construct
LSIDDGGVF

SEQ ID NO: 9066 - protein, 9 aa, synthetic construct
TQVKDWGFF

SEQ ID NO: 9067 - protein, 9 aa, synthetic construct
IGHGMLTVP

SEQ ID NO: 9068 - protein, 9 aa, synthetic construct
SCFRHFKID

SEQ ID NO: 9069 - protein, 9 aa, synthetic construct
SVFHDGRVG

SEQ ID NO: 9070 - protein, 9 aa, synthetic construct
SELNCKGLV

SEQ ID NO: 9071 - protein, 8 aa, synthetic construct
ALFDRHLG

SEQ ID NO: 9072 - protein, 9 aa, synthetic construct
TVIMVHRFH

SEQ ID NO: 9073 - protein, 9 aa, synthetic construct
VGCKAGMFK

SEQ ID NO: 9074 - protein, 8 aa, synthetic construct
TVVGAGIR

SEQ ID NO: 9075 - protein, 9 aa, synthetic construct
TVLKVAGFQ

SEQ ID NO: 9076 - protein, 12 aa, synthetic construct
TQSGGVAGALFQ

SEQ ID NO: 9077 - protein, 9 aa, synthetic construct
TVVAVASFL

SEQ ID NO: 9078 - protein, 13 aa, synthetic construct
VTIVQTGYSFMVR

SEQ ID NO: 9079 - protein, 8 aa, synthetic construct
TTLTNVLE

SEQ ID NO: 9080 - protein, 10 aa, synthetic construct
TGIIVGMRLR

SEQ ID NO: 9081 - protein, 6 aa, synthetic construct
LVRAWV

SEQ ID NO: 9082 - protein, 9 aa, synthetic construct
AGISIAGFF

SEQ ID NO: 9083 - protein, 9 aa, synthetic construct
MTYVNRSFV

SEQ ID NO: 9084 - protein, 9 aa, synthetic construct
TVVVTRHFV

SEQ ID NO: 9085 - protein, 9 aa, synthetic construct
TQLDWAHRV

SEQ ID NO: 9086 - protein, 13 aa, synthetic construct
TAMPGFGMIVGFA

SEQ ID NO: 9087 - protein, 12 aa, synthetic construct
TVLSVQTMFGLE

SEQ ID NO: 9088 - protein, 12 aa, synthetic construct
AVWSLDLKYRFA

SEQ ID NO: 9089 - protein, 9 aa, synthetic construct
TRFFAFVLE

SEQ ID NO: 9090 - protein, 9 aa, synthetic construct
SVMIDVRIL

SEQ ID NO: 9091 - protein, 9 aa, synthetic construct
STLVSSRFL

SEQ ID NO: 9092 - protein, 14 aa, synthetic construct
TSCIFRDLKIIGFS

SEQ ID NO: 9093 - protein, 9 aa, synthetic construct
TVFSMGMFG

SEQ ID NO: 9094 - protein, 11 aa, synthetic construct
GSYDAVARRFV

SEQ ID NO: 9095 - protein, 10 aa, synthetic construct
MGLGRRGNIV

SEQ ID NO: 9096 - protein, 11 aa, synthetic construct
TVLNLMSCRFV

SEQ ID NO: 9097 - protein, 8 aa, synthetic construct
TEFRVVKL

SEQ ID NO: 9098 - protein, 10 aa, synthetic construct
TVIVHKVGFQ

SEQ ID NO: 9099 - protein, 6 aa, synthetic construct
CVFDIR

SEQ ID NO: 9100 - protein, 11 aa, synthetic construct
TTRKDIGVGFL

SEQ ID NO: 9101 - protein, 12 aa, synthetic construct
TLYDVYLRHRFI

SEQ ID NO: 9102 - protein, 10 aa, synthetic construct
TGILSCVIIV

SEQ ID NO: 9103 - protein, 13 aa, synthetic construct
TVFNIMNYVGKFA

SEQ ID NO: 9104 - protein, 14 aa, synthetic construct
LIVNNNHSGGLRIG

SEQ ID NO: 9105 - protein, 9 aa, synthetic construct
TRLQLTRIL

SEQ ID NO: 9106 - protein, 13 aa, synthetic construct
TYIVRSKFAMAFT

SEQ ID NO: 9107 - protein, 9 aa, synthetic construct
VRMRSPGFV

SEQ ID NO: 9108 - protein, 8 aa, synthetic construct
TSLHNVFL

SEQ ID NO: 9109 - protein, 13 aa, synthetic construct
RGIVVTNSGCTWV

SEQ ID NO: 9110 - protein, 9 aa, synthetic construct
VSTIIARFI

SEQ ID NO: 9111 - protein, 10 aa, synthetic construct
VVITVNVMLS

SEQ ID NO: 9112 - protein, 9 aa, synthetic construct
TVIGSRRVG

SEQ ID NO: 9113 - protein, 11 aa, synthetic construct
GHMWWIGGGLL

SEQ ID NO: 9114 - protein, 9 aa, synthetic construct
VSVFDRGIR

SEQ ID NO: 9115 - protein, 10 aa, synthetic construct
VILRNGGYIR

SEQ ID NO: 9116 - protein, 9 aa, synthetic construct
TVAIDGLIR

SEQ ID NO: 9117 - protein, 13 aa, synthetic construct
LAIRSLKGHFLSA

SEQ ID NO: 9118 - protein, 12 aa, synthetic construct
LVVHLCDAVRIK

SEQ ID NO: 9119 - protein, 9 aa, synthetic construct
VLISDYMIR

SEQ ID NO: 9120 - protein, 11 aa, synthetic construct
TMVYHSFPWLR

SEQ ID NO: 9121 - protein, 10 aa, synthetic construct
VLSPSNVRRY

SEQ ID NO: 9122 - protein, 12 aa, synthetic construct
VVCVNVGGLGFI

SEQ ID NO: 9123 - protein, 12 aa, synthetic construct
TVADMRANPYFL

SEQ ID NO: 9124 - protein, 6 aa, synthetic construct
TDENFS

SEQ ID NO: 9125 - protein, 10 aa, synthetic construct
LDLIERGVWI

SEQ ID NO: 9126 - protein, 8 aa, synthetic construct
TGFAMGFE

SEQ ID NO: 9127 - protein, 9 aa, synthetic construct
TYRSYIFFM

SEQ ID NO: 9128 - protein, 9 aa, synthetic construct
TAVSWPNVR

SEQ ID NO: 9129 - protein, 13 aa, synthetic construct
TIISVGNCGVSVY

SEQ ID NO: 9130 - protein, 8 aa, synthetic construct
VVVTHTVN

SEQ ID NO: 9131 - protein, 10 aa, synthetic construct
IVITQWFDVT

SEQ ID NO: 9132 - protein, 10 aa, synthetic construct
TGISATIGYM

SEQ ID NO: 9133 - protein, 9 aa, synthetic construct
TYVWSGLFV

SEQ ID NO: 9134 - protein, 8 aa, synthetic construct
TVLLRGFA

SEQ ID NO: 9135 - protein, 9 aa, synthetic construct
SAVLQGRFR

SEQ ID NO: 9136 - protein, 7 aa, synthetic construct
LDLVIWQ

SEQ ID NO: 9137 - protein, 8 aa, synthetic construct
TVIDMYRF

SEQ ID NO: 9138 - protein, 13 aa, synthetic construct
VTMDFQAEHMTRR

SEQ ID NO: 9139 - protein, 10 aa, synthetic construct
ISISRIKGFS

SEQ ID NO: 9140 - protein, 10 aa, synthetic construct
VSLLGVEGFI

SEQ ID NO: 9141 - protein, 10 aa, synthetic construct
DCSVDDVVAV

SEQ ID NO: 9142 - protein, 8 aa, synthetic construct
TGMMLTIL

SEQ ID NO: 9143 - protein, 10 aa, synthetic construct
SVLIARGGLL

SEQ ID NO: 9144 - protein, 10 aa, synthetic construct
IRFYIDIGFM

SEQ ID NO: 9145 - protein, 10 aa, synthetic construct
STLDVRGHIR

SEQ ID NO: 9146 - protein, 7 aa, synthetic construct
VSVRAFK

SEQ ID NO: 9147 - protein, 9 aa, synthetic construct
AAACITQFR

SEQ ID NO: 9148 - protein, 9 aa, synthetic construct
TIIHLCHLS

SEQ ID NO: 9149 - protein, 13 aa, synthetic construct
VTTWRLFVFWTFL

SEQ ID NO: 9150 - protein, 10 aa, synthetic construct
TGYLVGIGFS

SEQ ID NO: 9151 - protein, 13 aa, synthetic construct
TGVQSEAERISMH

SEQ ID NO: 9152 - protein, 8 aa, synthetic construct
VGFTAVRM

SEQ ID NO: 9153 - protein, 8 aa, synthetic construct
TLIEHYFY

SEQ ID NO: 9154 - protein, 9 aa, synthetic construct
TCVMPYLFS

SEQ ID NO: 9155 - protein, 8 aa, synthetic construct
VVFHRRKH

SEQ ID NO: 9156 - protein, 12 aa, synthetic construct
TLIVADRFVRFA

SEQ ID NO: 9157 - protein, 9 aa, synthetic construct
VTVGVGGFV

SEQ ID NO: 9158 - protein, 10 aa, synthetic construct
VILLENLTFV

SEQ ID NO: 9159 - protein, 11 aa, synthetic construct
TTLVLERRVFE

SEQ ID NO: 9160 - protein, 9 aa, synthetic construct
TCVANHGFR

SEQ ID NO: 9161 - protein, 10 aa, synthetic construct
VFIMQCGPFV

SEQ ID NO: 9162 - protein, 11 aa, synthetic construct
TALHSATYKVV

SEQ ID NO: 9163 - protein, 9 aa, synthetic construct
TTCGAGPMR

SEQ ID NO: 9164 - protein, 9 aa, synthetic construct
TVLIKVRPV

SEQ ID NO: 9165 - protein, 9 aa, synthetic construct
TIFHDIVFV

SEQ ID NO: 9166 - protein, 8 aa, synthetic construct
ISSESDWT

SEQ ID NO: 9167 - protein, 10 aa, synthetic construct
AMLTIRGEIE

SEQ ID NO: 9168 - protein, 10 aa, synthetic construct
MGISVSLGFV

SEQ ID NO: 9169 - protein, 12 aa, synthetic construct
TSIELGTLTRII

SEQ ID NO: 9170 - protein, 9 aa, synthetic construct
ARFSLSRFV

SEQ ID NO: 9171 - protein, 11 aa, synthetic construct
VIVNTVQMRFD

SEQ ID NO: 9172 - protein, 11 aa, synthetic construct
TLLVVGRLVIL

SEQ ID NO: 9173 - protein, 9 aa, synthetic construct
TAFLRVNFI

SEQ ID NO: 9174 - protein, 9 aa, synthetic construct
TLFSISVFV

SEQ ID NO: 9175 - protein, 7 aa, synthetic construct
VTIPTFR

SEQ ID NO: 9176 - protein, 11 aa, synthetic construct
TAVEVVASVIT

SEQ ID NO: 9177 - protein, 9 aa, synthetic construct
SSWDVVRFS

SEQ ID NO: 9178 - protein, 8 aa, synthetic construct
STILKGFN

SEQ ID NO: 9179 - protein, 10 aa, synthetic construct
RVVRMSITFG

SEQ ID NO: 9180 - protein, 9 aa, synthetic construct
TRVGPSRFM

SEQ ID NO: 9181 - protein, 8 aa, synthetic construct
TVVRGIVM

SEQ ID NO: 9182 - protein, 10 aa, synthetic construct
TMILLGTGVI

SEQ ID NO: 9183 - protein, 9 aa, synthetic construct
TVARKHDFR

SEQ ID NO: 9184 - protein, 9 aa, synthetic construct
VVCNTHGFV

SEQ ID NO: 9185 - protein, 9 aa, synthetic construct
TATLRADIV

SEQ ID NO: 9186 - protein, 10 aa, synthetic construct
IVFPNGGRAR

SEQ ID NO: 9187 - protein, 8 aa, synthetic construct
TMLTLVLM

SEQ ID NO: 9188 - protein, 10 aa, synthetic construct
TTHVPCLGFR

SEQ ID NO: 9189 - protein, 8 aa, synthetic construct
TTWSFGVT

SEQ ID NO: 9190 - protein, 9 aa, synthetic construct
DVNERGLVG

SEQ ID NO: 9191 - protein, 10 aa, synthetic construct
VIHTSRSRFR

SEQ ID NO: 9192 - protein, 9 aa, synthetic construct
MSLDDGRIH

SEQ ID NO: 9193 - protein, 10 aa, synthetic construct
TAVGVAHTID

SEQ ID NO: 9194 - protein, 9 aa, synthetic construct
VYVHSGGLC

SEQ ID NO: 9195 - protein, 9 aa, synthetic construct
TAEGRSAFR

SEQ ID NO: 9196 - protein, 8 aa, synthetic construct
TMMMNRVY

SEQ ID NO: 9197 - protein, 10 aa, synthetic construct
VQFDRVCHKV

SEQ ID NO: 9198 - protein, 10 aa, synthetic construct
VCTHENVGWR

SEQ ID NO: 9199 - protein, 11 aa, synthetic construct
MAFESRRGVML

SEQ ID NO: 9200 - protein, 8 aa, synthetic construct
TTFEGRKT

SEQ ID NO: 9201 - protein, 10 aa, synthetic construct
TLLSQGGVIN

SEQ ID NO: 9202 - protein, 10 aa, synthetic construct
VVVDVMWRFW

SEQ ID NO: 9203 - protein, 12 aa, synthetic construct
TAVVCGRITNVV

SEQ ID NO: 9204 - protein, 9 aa, synthetic construct
LVVTHMAVM

SEQ ID NO: 9205 - protein, 9 aa, synthetic construct
VVKGVNYFR

SEQ ID NO: 9206 - protein, 9 aa, synthetic construct
ITANTFGLF

SEQ ID NO: 9207 - protein, 9 aa, synthetic construct
TCLLMTSVK

SEQ ID NO: 9208 - protein, 9 aa, synthetic construct
TTLLASGFF

SEQ ID NO: 9209 - protein, 12 aa, synthetic construct
VRFGEGYSHVFQ

SEQ ID NO: 9210 - protein, 10 aa, synthetic construct
TRVEQRRTIN

SEQ ID NO: 9211 - protein, 13 aa, synthetic construct
SKVDTVFEVPAIV

SEQ ID NO: 9212 - protein, 6 aa, synthetic construct
LTIRCH

SEQ ID NO: 9213 - protein, 9 aa, synthetic construct
TVILGRLIA

SEQ ID NO: 9214 - protein, 10 aa, synthetic construct
SVLDTTTGLI

SEQ ID NO: 9215 - protein, 8 aa, synthetic construct
LMVMSGFH

SEQ ID NO: 9216 - protein, 10 aa, synthetic construct
VTIHALLSIK

SEQ ID NO: 9217 - protein, 11 aa, synthetic construct
VYVCHLRVMFI

SEQ ID NO: 9218 - protein, 8 aa, synthetic construct
TALRFMFD

SEQ ID NO: 9219 - protein, 9 aa, synthetic construct
FGLGGERNT

SEQ ID NO: 9220 - protein, 9 aa, synthetic construct
VWITAVGRI

SEQ ID NO: 9221 - protein, 11 aa, synthetic construct
SVIDVSEGLLK

SEQ ID NO: 9222 - protein, 8 aa, synthetic construct
IVLHMGWR

SEQ ID NO: 9223 - protein, 10 aa, synthetic construct
VLYVPDSGFE

SEQ ID NO: 9224 - protein, 9 aa, synthetic construct
LAFMGTYVT

SEQ ID NO: 9225 - protein, 9 aa, synthetic construct
TSLVRVGLK

SEQ ID NO: 9226 - protein, 7 aa, synthetic construct
CVVKNDE

SEQ ID NO: 9227 - protein, 10 aa, synthetic construct
TAIWNRSRFM

SEQ ID NO: 9228 - protein, 10 aa, synthetic construct
TAFIVNLGFG

SEQ ID NO: 9229 - protein, 11 aa, synthetic construct
TSILLPRYTIA

SEQ ID NO: 9230 - protein, 10 aa, synthetic construct
VGLLEDWSRK

SEQ ID NO: 9231 - protein, 11 aa, synthetic construct
TGLSGIGMVFA

SEQ ID NO: 9232 - protein, 6 aa, synthetic construct
VTDRII

SEQ ID NO: 9233 - protein, 8 aa, synthetic construct
LANGMNVI

SEQ ID NO: 9234 - protein, 9 aa, synthetic construct
TVFSIAGFT

SEQ ID NO: 9235 - protein, 9 aa, synthetic construct
TVYCNDMIM

SEQ ID NO: 9236 - protein, 9 aa, synthetic construct
VVFAAGIFN

SEQ ID NO: 9237 - protein, 11 aa, synthetic construct
LSWDVANGLIV

SEQ ID NO: 9238 - protein, 10 aa, synthetic construct
LKVTAVGRFN

SEQ ID NO: 9239 - protein, 9 aa, synthetic construct
TVVRGYVLA

SEQ ID NO: 9240 - protein, 9 aa, synthetic construct
TKVACLKFE

SEQ ID NO: 9241 - protein, 10 aa, synthetic construct
VGFSVKGFFT

SEQ ID NO: 9242 - protein, 9 aa, synthetic construct
TGFVLGAFV

SEQ ID NO: 9243 - protein, 9 aa, synthetic construct
TIRDRGRFI

SEQ ID NO: 9244 - protein, 8 aa, synthetic construct
TRLVYKFV

SEQ ID NO: 9245 - protein, 10 aa, synthetic construct
LVIIGLMFIA

SEQ ID NO: 9246 - protein, 9 aa, synthetic construct
TSYGGDGFV

SEQ ID NO: 9247 - protein, 7 aa, synthetic construct
LGKGVGG

SEQ ID NO: 9248 - protein, 8 aa, synthetic construct
TGLQDRLV

SEQ ID NO: 9249 - protein, 9 aa, synthetic construct
TDLAVRGFV

SEQ ID NO: 9250 - protein, 9 aa, synthetic construct
LIVGDNRPK

SEQ ID NO: 9251 - protein, 13 aa, synthetic construct
TVLECHDGKIMFV

SEQ ID NO: 9252 - protein, 8 aa, synthetic construct
TIWRRLFF

SEQ ID NO: 9253 - protein, 9 aa, synthetic construct
MGLSPVKVF

SEQ ID NO: 9254 - protein, 9 aa, synthetic construct
MTFSMGAKN

SEQ ID NO: 9255 - protein, 9 aa, synthetic construct
VVVRNGTFR

SEQ ID NO: 9256 - protein, 10 aa, synthetic construct
WQLSSTMQFL

SEQ ID NO: 9257 - protein, 11 aa, synthetic construct
TSLVWASMRIT

SEQ ID NO: 9258 - protein, 9 aa, synthetic construct
ESINVYVGY

SEQ ID NO: 9259 - protein, 13 aa, synthetic construct
AVLIALRNYFGFD

SEQ ID NO: 9260 - protein, 9 aa, synthetic construct
VTVMVRGFL

SEQ ID NO: 9261 - protein, 9 aa, synthetic construct
TVWHKMVMG

SEQ ID NO: 9262 - protein, 9 aa, synthetic construct
VDFSSYAFG

SEQ ID NO: 9263 - protein, 9 aa, synthetic construct
DVLDERGLI

SEQ ID NO: 9264 - protein, 9 aa, synthetic construct
VYMVLKVFM

SEQ ID NO: 9265 - protein, 14 aa, synthetic construct
TILRTEVGAAVIFK

SEQ ID NO: 9266 - protein, 9 aa, synthetic construct
WNITARKFG

SEQ ID NO: 9267 - protein, 6 aa, synthetic construct
VVEVWA

SEQ ID NO: 9268 - protein, 10 aa, synthetic construct
TKVVRGGRFS

SEQ ID NO: 9269 - protein, 13 aa, synthetic construct
TALCNNGLTRAFQ

SEQ ID NO: 9270 - protein, 14 aa, synthetic construct
TDVSRGRVGGTIFI

SEQ ID NO: 9271 - protein, 12 aa, synthetic construct
TSVQGRSLRGFD

SEQ ID NO: 9272 - protein, 7 aa, synthetic construct
GLDQGAM

SEQ ID NO: 9273 - protein, 9 aa, synthetic construct
TRVGSGSFD

SEQ ID NO: 9274 - protein, 12 aa, synthetic construct
TICNQSLERHFI

SEQ ID NO: 9275 - protein, 10 aa, synthetic construct
SIIDVTVFLR

SEQ ID NO: 9276 - protein, 8 aa, synthetic construct
IHVQNGWV

SEQ ID NO: 9277 - protein, 9 aa, synthetic construct
VVMRQRTFR

SEQ ID NO: 9278 - protein, 9 aa, synthetic construct
SVVRPTGVT

SEQ ID NO: 9279 - protein, 10 aa, synthetic construct
VTYTLQTGFI

SEQ ID NO: 9280 - protein, 9 aa, synthetic construct
TDFAAHLLW

SEQ ID NO: 9281 - protein, 8 aa, synthetic construct
TVFDLVFI

SEQ ID NO: 9282 - protein, 10 aa, synthetic construct
TVWLGAYGFG

SEQ ID NO: 9283 - protein, 12 aa, synthetic construct
TSMCLGAVTAFV

SEQ ID NO: 9284 - protein, 10 aa, synthetic construct
LGFSFEGYLG

SEQ ID NO: 9285 - protein, 13 aa, synthetic construct
TSLDGKRVQVGFI

SEQ ID NO: 9286 - protein, 8 aa, synthetic construct
TAFKDSFV

SEQ ID NO: 9287 - protein, 9 aa, synthetic construct
TGRLMNGFV

SEQ ID NO: 9288 - protein, 8 aa, synthetic construct
TLMLNGRK

SEQ ID NO: 9289 - protein, 7 aa, synthetic construct
MHQDGRD

SEQ ID NO: 9290 - protein, 9 aa, synthetic construct
TAVSDRGFR

SEQ ID NO: 9291 - protein, 13 aa, synthetic construct
TKVVHTALGILFR

SEQ ID NO: 9292 - protein, 9 aa, synthetic construct
TGLSLLGFV

SEQ ID NO: 9293 - protein, 9 aa, synthetic construct
SVFKMGVLV

SEQ ID NO: 9294 - protein, 6 aa, synthetic construct
FHYGFV

SEQ ID NO: 9295 - protein, 8 aa, synthetic construct
TGMTMVKC

SEQ ID NO: 9296 - protein, 10 aa, synthetic construct
TVLEAHVMFE

SEQ ID NO: 9297 - protein, 8 aa, synthetic construct
VVMTHRFR

SEQ ID NO: 9298 - protein, 8 aa, synthetic construct
TAFTADVY

SEQ ID NO: 9299 - protein, 6 aa, synthetic construct
VDSRIR

SEQ ID NO: 9300 - protein, 10 aa, synthetic construct
LGIGVFGSLN

SEQ ID NO: 9301 - protein, 10 aa, synthetic construct
VTRTWPGGFE

SEQ ID NO: 9302 - protein, 9 aa, synthetic construct
TYFVFPTFM

SEQ ID NO: 9303 - protein, 14 aa, synthetic construct
RGVNVPGTMFMHFF

SEQ ID NO: 9304 - protein, 7 aa, synthetic construct
LALPEWV

SEQ ID NO: 9305 - protein, 13 aa, synthetic construct
TCIHFMADRVNVM

SEQ ID NO: 9306 - protein, 9 aa, synthetic construct
VTVAPLGFV

SEQ ID NO: 9307 - protein, 8 aa, synthetic construct
LCMDVYKV

SEQ ID NO: 9308 - protein, 11 aa, synthetic construct
TLWLGCLKGFS

SEQ ID NO: 9309 - protein, 6 aa, synthetic construct
TDLFFD

SEQ ID NO: 9310 - protein, 9 aa, synthetic construct
TFVTRQGII

SEQ ID NO: 9311 - protein, 8 aa, synthetic construct
TALNGTFK

SEQ ID NO: 9312 - protein, 9 aa, synthetic construct
LGHNTCNGG

SEQ ID NO: 9313 - protein, 14 aa, synthetic construct
TGVIVDIMGSCSFR

SEQ ID NO: 9314 - protein, 8 aa, synthetic construct
TAFVRIKM

SEQ ID NO: 9315 - protein, 9 aa, synthetic construct
MQYGSFGFF

SEQ ID NO: 9316 - protein, 8 aa, synthetic construct
TIFVMGFV

SEQ ID NO: 9317 - protein, 9 aa, synthetic construct
TIVARGRIV

SEQ ID NO: 9318 - protein, 8 aa, synthetic construct
LGFFAHTA

SEQ ID NO: 9319 - protein, 9 aa, synthetic construct
TTVVARGFM

SEQ ID NO: 9320 - protein, 8 aa, synthetic construct
TCIKMVFR

SEQ ID NO: 9321 - protein, 9 aa, synthetic construct
VMLKGGCFW

SEQ ID NO: 9322 - protein, 9 aa, synthetic construct
VSHYLGMFE

SEQ ID NO: 9323 - protein, 9 aa, synthetic construct
VTICGLGIV

SEQ ID NO: 9324 - protein, 10 aa, synthetic construct
TAMEIGGKFV

SEQ ID NO: 9325 - protein, 10 aa, synthetic construct
VWMNIVGLFG

SEQ ID NO: 9326 - protein, 10 aa, synthetic construct
SVHVDLGGFH

SEQ ID NO: 9327 - protein, 9 aa, synthetic construct
IAIRNGKFV

SEQ ID NO: 9328 - protein, 8 aa, synthetic construct
AVLGVRLL

SEQ ID NO: 9329 - protein, 8 aa, synthetic construct
TCIRHCVY

SEQ ID NO: 9330 - protein, 8 aa, synthetic construct
TVVWATFF

SEQ ID NO: 9331 - protein, 11 aa, synthetic construct
TSIVITMKRFV

SEQ ID NO: 9332 - protein, 9 aa, synthetic construct
VKPSDSIVT

SEQ ID NO: 9333 - protein, 13 aa, synthetic construct
TVLSISNHGVDKI

SEQ ID NO: 9334 - protein, 9 aa, synthetic construct
VEIGYSDDF

SEQ ID NO: 9335 - protein, 9 aa, synthetic construct
TVIGRDYFL

SEQ ID NO: 9336 - protein, 8 aa, synthetic construct
VVVDRSFT

SEQ ID NO: 9337 - protein, 6 aa, synthetic construct
GNDVHH

SEQ ID NO: 9338 - protein, 10 aa, synthetic construct
TVLGYGGFIV

SEQ ID NO: 9339 - protein, 8 aa, synthetic construct
GFHHDVFF

SEQ ID NO: 9340 - protein, 9 aa, synthetic construct
VQVTNAGVT

SEQ ID NO: 9341 - protein, 10 aa, synthetic construct
VILDVLVRFR

SEQ ID NO: 9342 - protein, 9 aa, synthetic construct
TTGRPDGFV

SEQ ID NO: 9343 - protein, 11 aa, synthetic construct
TKLDLMEHTFI

SEQ ID NO: 9344 - protein, 6 aa, synthetic construct
TTYAFR

SEQ ID NO: 9345 - protein, 12 aa, synthetic construct
VYFIEIPTRSFA

SEQ ID NO: 9346 - protein, 9 aa, synthetic construct
TVMVVGRFE

SEQ ID NO: 9347 - protein, 11 aa, synthetic construct
DGWLKAAAGVV

SEQ ID NO: 9348 - protein, 10 aa, synthetic construct
TEGANADTSL

SEQ ID NO: 9349 - protein, 13 aa, synthetic construct
AVFKAGVAFRGFK

SEQ ID NO: 9350 - protein, 10 aa, synthetic construct
TACQLPFGIM

SEQ ID NO: 9351 - protein, 10 aa, synthetic construct
DVSDVYGVWT

SEQ ID NO: 9352 - protein, 9 aa, synthetic construct
TSLYVPGFV

SEQ ID NO: 9353 - protein, 11 aa, synthetic construct
TTIDRRVFTSK

SEQ ID NO: 9354 - protein, 13 aa, synthetic construct
LLYDMGRSRIIME

SEQ ID NO: 9355 - protein, 11 aa, synthetic construct
TVLVSSVPCFT

SEQ ID NO: 9356 - protein, 6 aa, synthetic construct
VTRILE

SEQ ID NO: 9357 - protein, 9 aa, synthetic construct
TAFDIANKL

SEQ ID NO: 9358 - protein, 14 aa, synthetic construct
IEFQMAVDHRAQFV

SEQ ID NO: 9359 - protein, 8 aa, synthetic construct
TVWLTNFS

SEQ ID NO: 9360 - protein, 9 aa, synthetic construct
TVFGPRHRS

SEQ ID NO: 9361 - protein, 7 aa, synthetic construct
LILADWK

SEQ ID NO: 9362 - protein, 10 aa, synthetic construct
TRLRAGLGLT

SEQ ID NO: 9363 - protein, 11 aa, synthetic construct
TSFDRDVMRFL

SEQ ID NO: 9364 - protein, 8 aa, synthetic construct
TGICGKFT

SEQ ID NO: 9365 - protein, 9 aa, synthetic construct
DNENTDANL

SEQ ID NO: 9366 - protein, 8 aa, synthetic construct
TLVNTLFW

SEQ ID NO: 9367 - protein, 10 aa, synthetic construct
TKLHPGRGKV

SEQ ID NO: 9368 - protein, 10 aa, synthetic construct
TSVNERNIFD

SEQ ID NO: 9369 - protein, 12 aa, synthetic construct
TGFRPMRCPPFV

SEQ ID NO: 9370 - protein, 9 aa, synthetic construct
VYTSVIGFR

SEQ ID NO: 9371 - protein, 12 aa, synthetic construct
VYTVAGGMHRFA

SEQ ID NO: 9372 - protein, 11 aa, synthetic construct
TYILLGWRGFH

SEQ ID NO: 9373 - protein, 14 aa, synthetic construct
SVLRFVGDVIVGFG

SEQ ID NO: 9374 - protein, 13 aa, synthetic construct
VTLDMVRFIGKKV

SEQ ID NO: 9375 - protein, 10 aa, synthetic construct
TDVRDDFDFQ

SEQ ID NO: 9376 - protein, 10 aa, synthetic construct
TLAGTGYGFA

SEQ ID NO: 9377 - protein, 14 aa, synthetic construct
VSVVVSVGVVVGFR

SEQ ID NO: 9378 - protein, 8 aa, synthetic construct
TVIMSHFV

SEQ ID NO: 9379 - protein, 12 aa, synthetic construct
LYVHVGIASRIV

SEQ ID NO: 9380 - protein, 10 aa, synthetic construct
STFVVGEGFA

SEQ ID NO: 9381 - protein, 8 aa, synthetic construct
TKFDGGFK

SEQ ID NO: 9382 - protein, 14 aa, synthetic construct
TMINVGKNNVVRFA

SEQ ID NO: 9383 - protein, 10 aa, synthetic construct
TSWDGSGRFK

SEQ ID NO: 9384 - protein, 9 aa, synthetic construct
VEADSVGMG

SEQ ID NO: 9385 - protein, 14 aa, synthetic construct
TDMVVGLRLGLCVY

SEQ ID NO: 9386 - protein, 6 aa, synthetic construct
YCTRST

SEQ ID NO: 9387 - protein, 9 aa, synthetic construct
TGMSAMGLR

SEQ ID NO: 9388 - protein, 13 aa, synthetic construct
TTLTNAQGRIVRD

SEQ ID NO: 9389 - protein, 14 aa, synthetic construct
TYIKMEPSGIIHVI

SEQ ID NO: 9390 - protein, 9 aa, synthetic construct
TEVVMPGFF

SEQ ID NO: 9391 - protein, 9 aa, synthetic construct
DCMMEVGYR

SEQ ID NO: 9392 - protein, 13 aa, synthetic construct
VAVLLDNGKMYIQ

SEQ ID NO: 9393 - protein, 8 aa, synthetic construct
SVFDQRIV

SEQ ID NO: 9394 - protein, 9 aa, synthetic construct
VAFVRGFFA

SEQ ID NO: 9395 - protein, 8 aa, synthetic construct
VIVARWFT

SEQ ID NO: 9396 - protein, 9 aa, synthetic construct
TTLGNDGLV

SEQ ID NO: 9397 - protein, 11 aa, synthetic construct
VRLDTLVGVFI

SEQ ID NO: 9398 - protein, 14 aa, synthetic construct
TMYCAGSGWLGVFR

SEQ ID NO: 9399 - protein, 10 aa, synthetic construct
TTVNVEGRFH

SEQ ID NO: 9400 - protein, 8 aa, synthetic construct
TTFDGLFF

SEQ ID NO: 9401 - protein, 9 aa, synthetic construct
VVIDCGYIV

SEQ ID NO: 9402 - protein, 10 aa, synthetic construct
VTLGDTHTFL

SEQ ID NO: 9403 - protein, 9 aa, synthetic construct
LVHGPQVWN

SEQ ID NO: 9404 - protein, 8 aa, synthetic construct
TVFYNGFV

SEQ ID NO: 9405 - protein, 10 aa, synthetic construct
TEMRDGVGMV

SEQ ID NO: 9406 - protein, 11 aa, synthetic construct
TELAVKVNRWI

SEQ ID NO: 9407 - protein, 12 aa, synthetic construct
TGIVVVRPLRFV

SEQ ID NO: 9408 - protein, 7 aa, synthetic construct
CEMTHDV

SEQ ID NO: 9409 - protein, 9 aa, synthetic construct
TTLQPQGFR

SEQ ID NO: 9410 - protein, 10 aa, synthetic construct
STLLYYLGVR

SEQ ID NO: 9411 - protein, 8 aa, synthetic construct
TMFNTRLN

SEQ ID NO: 9412 - protein, 8 aa, synthetic construct
TAFNRCKR

SEQ ID NO: 9413 - protein, 13 aa, synthetic construct
AGLRQRAMVLLLE

SEQ ID NO: 9414 - protein, 8 aa, synthetic construct
VIIGNCFV

SEQ ID NO: 9415 - protein, 10 aa, synthetic construct
LAVSIPNLIR

SEQ ID NO: 9416 - protein, 10 aa, synthetic construct
STITKGRCFR

SEQ ID NO: 9417 - protein, 9 aa, synthetic construct
VSVRSIGVR

SEQ ID NO: 9418 - protein, 13 aa, synthetic construct
LTIRAIALERTIQ

SEQ ID NO: 9419 - protein, 9 aa, synthetic construct
TSLVGVMFR

SEQ ID NO: 9420 - protein, 8 aa, synthetic construct
SCCVHSKN

SEQ ID NO: 9421 - protein, 12 aa, synthetic construct
TMFRETGTQGFI

SEQ ID NO: 9422 - protein, 9 aa, synthetic construct
VFVRMDGFW

SEQ ID NO: 9423 - protein, 12 aa, synthetic construct
TAITKGFVVRFS

SEQ ID NO: 9424 - protein, 10 aa, synthetic construct
TYIAGPRGFR

SEQ ID NO: 9425 - protein, 12 aa, synthetic construct
TAIHMSRGDRFV

SEQ ID NO: 9426 - protein, 10 aa, synthetic construct
VEDLTKLWTW

SEQ ID NO: 9427 - protein, 9 aa, synthetic construct
TDCDELGFV

SEQ ID NO: 9428 - protein, 8 aa, synthetic construct
SDDNRESD

SEQ ID NO: 9429 - protein, 10 aa, synthetic construct
TKCTASWGIA

SEQ ID NO: 9430 - protein, 9 aa, synthetic construct
DILLNMRFE

SEQ ID NO: 9431 - protein, 9 aa, synthetic construct
WTINTKGVQ

SEQ ID NO: 9432 - protein, 10 aa, synthetic construct
VTWCGQSGFH

SEQ ID NO: 9433 - protein, 12 aa, synthetic construct
TVFAVRLCAPVV

SEQ ID NO: 9434 - protein, 12 aa, synthetic construct
TCVCNAAKVRIM

SEQ ID NO: 9435 - protein, 9 aa, synthetic construct
TGLRGGGFL

SEQ ID NO: 9436 - protein, 6 aa, synthetic construct
VTNRIK

SEQ ID NO: 9437 - protein, 9 aa, synthetic construct
SVFTGLRIV

SEQ ID NO: 9438 - protein, 9 aa, synthetic construct
AAVRADSFV

SEQ ID NO: 9439 - protein, 6 aa, synthetic construct
ISSRIV

SEQ ID NO: 9440 - protein, 8 aa, synthetic construct
TIISDIRF

SEQ ID NO: 9441 - protein, 10 aa, synthetic construct
VIMNPGVGKG

SEQ ID NO: 9442 - protein, 8 aa, synthetic construct
VTCMQLIH

SEQ ID NO: 9443 - protein, 11 aa, synthetic construct
VGVTGICWERY

SEQ ID NO: 9444 - protein, 12 aa, synthetic construct
TLLGIGRHHGFS

SEQ ID NO: 9445 - protein, 9 aa, synthetic construct
TALVPRGFR

SEQ ID NO: 9446 - protein, 8 aa, synthetic construct
VVLRDTFV

SEQ ID NO: 9447 - protein, 8 aa, synthetic construct
TTWLRRFL

SEQ ID NO: 9448 - protein, 12 aa, synthetic construct
TVWIAVNRSYLR

SEQ ID NO: 9449 - protein, 13 aa, synthetic construct
VCVTLRNSQVGFA

SEQ ID NO: 9450 - protein, 8 aa, synthetic construct
TVLKHVFK

SEQ ID NO: 9451 - protein, 11 aa, synthetic construct
GALRGLWEDIE

SEQ ID NO: 9452 - protein, 8 aa, synthetic construct
TFFSVRVD

SEQ ID NO: 9453 - protein, 7 aa, synthetic construct
TLYAAFK

SEQ ID NO: 9454 - protein, 13 aa, synthetic construct
ATFNGSESHVALS

SEQ ID NO: 9455 - protein, 12 aa, synthetic construct
TSLDPANGYRKV

SEQ ID NO: 9456 - protein, 10 aa, synthetic construct
VCLVMLLGFA

SEQ ID NO: 9457 - protein, 9 aa, synthetic construct
VALVGIYLM

SEQ ID NO: 9458 - protein, 9 aa, synthetic construct
TEVRTTGFS

SEQ ID NO: 9459 - protein, 9 aa, synthetic construct
WKGSSGVDQ

SEQ ID NO: 9460 - protein, 9 aa, synthetic construct
ECINIGQFF

SEQ ID NO: 9461 - protein, 9 aa, synthetic construct
TVLFFRRFA

SEQ ID NO: 9462 - protein, 8 aa, synthetic construct
VQLMNKKA

SEQ ID NO: 9463 - protein, 9 aa, synthetic construct
TRFSAEGHR

SEQ ID NO: 9464 - protein, 9 aa, synthetic construct
TWIIHSGVG

SEQ ID NO: 9465 - protein, 9 aa, synthetic construct
TCFDRNVLS

SEQ ID NO: 9466 - protein, 8 aa, synthetic construct
TVVDTFVH

SEQ ID NO: 9467 - protein, 8 aa, synthetic construct
TVLIIRFN

SEQ ID NO: 9468 - protein, 8 aa, synthetic construct
AVLKNGFV

SEQ ID NO: 9469 - protein, 10 aa, synthetic construct
TSAETNGRFV

SEQ ID NO: 9470 - protein, 10 aa, synthetic construct
TLIDSTGLKM

SEQ ID NO: 9471 - protein, 9 aa, synthetic construct
TIVARNVLC

SEQ ID NO: 9472 - protein, 9 aa, synthetic construct
IGLWEHLFV

SEQ ID NO: 9473 - protein, 8 aa, synthetic construct
VRIMDVFR

SEQ ID NO: 9474 - protein, 14 aa, synthetic construct
TSVVLVIGVVHSLV

SEQ ID NO: 9475 - protein, 14 aa, synthetic construct
TKIVRVVNGEYRFL

SEQ ID NO: 9476 - protein, 8 aa, synthetic construct
SLVMMLKQ

SEQ ID NO: 9477 - protein, 10 aa, synthetic construct
TVVDRGGFVR

SEQ ID NO: 9478 - protein, 8 aa, synthetic construct
TAMTCFKL

SEQ ID NO: 9479 - protein, 13 aa, synthetic construct
TKFRPVDGRILLH

SEQ ID NO: 9480 - protein, 14 aa, synthetic construct
PYGGGIDLLLCRKI

SEQ ID NO: 9481 - protein, 9 aa, synthetic construct
SLLVGFRIE

SEQ ID NO: 9482 - protein, 13 aa, synthetic construct
CCLMVRDIGIAIV

SEQ ID NO: 9483 - protein, 12 aa, synthetic construct
MSIKVGSSLRFC

SEQ ID NO: 9484 - protein, 11 aa, synthetic construct
TAFVAGEAVFR

SEQ ID NO: 9485 - protein, 9 aa, synthetic construct
VVVNTGLFE

SEQ ID NO: 9486 - protein, 10 aa, synthetic construct
VYLGVNIVFG

SEQ ID NO: 9487 - protein, 11 aa, synthetic construct
TTICGDYAVFI

SEQ ID NO: 9488 - protein, 10 aa, synthetic construct
MMVTRQGRFN

SEQ ID NO: 9489 - protein, 9 aa, synthetic construct
VIVDELGFY

SEQ ID NO: 9490 - protein, 12 aa, synthetic construct
TVIGVVDAGMIT

SEQ ID NO: 9491 - protein, 8 aa, synthetic construct
VDINPGIR

SEQ ID NO: 9492 - protein, 11 aa, synthetic construct
TVVHEVGFGFM

SEQ ID NO: 9493 - protein, 10 aa, synthetic construct
TECKASMGLL

SEQ ID NO: 9494 - protein, 8 aa, synthetic construct
SMFMGRFI

SEQ ID NO: 9495 - protein, 10 aa, synthetic construct
TSIIPGLQFV

SEQ ID NO: 9496 - protein, 9 aa, synthetic construct
SQFVGNGVM

SEQ ID NO: 9497 - protein, 10 aa, synthetic construct
TTVGGGRGVL

SEQ ID NO: 9498 - protein, 9 aa, synthetic construct
VALAKGAIE

SEQ ID NO: 9499 - protein, 9 aa, synthetic construct
WEVSEVGFR

SEQ ID NO: 9500 - protein, 9 aa, synthetic construct
LVLGRSEFR

SEQ ID NO: 9501 - protein, 9 aa, synthetic construct
TTEVVRGFR

SEQ ID NO: 9502 - protein, 10 aa, synthetic construct
WLIYLVRGFV

SEQ ID NO: 9503 - protein, 10 aa, synthetic construct
TVWHPGLSFS

SEQ ID NO: 9504 - protein, 8 aa, synthetic construct
LVNINKDR

SEQ ID NO: 9505 - protein, 9 aa, synthetic construct
TVLGMHRFT

SEQ ID NO: 9506 - protein, 10 aa, synthetic construct
TVLDVGMGFQ

SEQ ID NO: 9507 - protein, 13 aa, synthetic construct
MSLRKVGRSEVFA

SEQ ID NO: 9508 - protein, 9 aa, synthetic construct
VIASEVCIH

SEQ ID NO: 9509 - protein, 13 aa, synthetic construct
TIVRLRLVIQAFE

SEQ ID NO: 9510 - protein, 9 aa, synthetic construct
VMVGFGRFY

SEQ ID NO: 9511 - protein, 8 aa, synthetic construct
TCIVKRFV

SEQ ID NO: 9512 - protein, 10 aa, synthetic construct
AIITETLRFT

SEQ ID NO: 9513 - protein, 11 aa, synthetic construct
VRFIVHRHAFV

SEQ ID NO: 9514 - protein, 8 aa, synthetic construct
TVSKLGFE

SEQ ID NO: 9515 - protein, 10 aa, synthetic construct
TVFREGFGFA

SEQ ID NO: 9516 - protein, 10 aa, synthetic construct
TTWGDVDGVM

SEQ ID NO: 9517 - protein, 10 aa, synthetic construct
VLHTRLLRFE

SEQ ID NO: 9518 - protein, 9 aa, synthetic construct
FSIRGGMWI

SEQ ID NO: 9519 - protein, 8 aa, synthetic construct
LRVLMGVC

SEQ ID NO: 9520 - protein, 9 aa, synthetic construct
TLVVDRGFR

SEQ ID NO: 9521 - protein, 9 aa, synthetic construct
TELVHCAFF

SEQ ID NO: 9522 - protein, 9 aa, synthetic construct
VVIDVQGKS

SEQ ID NO: 9523 - protein, 8 aa, synthetic construct
TTFRSVLR

SEQ ID NO: 9524 - protein, 8 aa, synthetic construct
TVVLMRVH

SEQ ID NO: 9525 - protein, 10 aa, synthetic construct
TVLNVKVGFM

SEQ ID NO: 9526 - protein, 6 aa, synthetic construct
TIIDFR

SEQ ID NO: 9527 - protein, 10 aa, synthetic construct
TTMAVGNGKQ

SEQ ID NO: 9528 - protein, 9 aa, synthetic construct
TVIDAMHFR

SEQ ID NO: 9529 - protein, 9 aa, synthetic construct
TCFEGIVLK

SEQ ID NO: 9530 - protein, 8 aa, synthetic construct
DALREGIK

SEQ ID NO: 9531 - protein, 13 aa, synthetic construct
TEVVNRGRNVLFK

SEQ ID NO: 9532 - protein, 9 aa, synthetic construct
SCFVDSVMR

SEQ ID NO: 9533 - protein, 6 aa, synthetic construct
TIIGFS

SEQ ID NO: 9534 - protein, 8 aa, synthetic construct
IRGDVRNA

SEQ ID NO: 9535 - protein, 9 aa, synthetic construct
VSLRLDGFK

SEQ ID NO: 9536 - protein, 9 aa, synthetic construct
SAFLLSGLR

SEQ ID NO: 9537 - protein, 8 aa, synthetic construct
SLIWFLIV

SEQ ID NO: 9538 - protein, 6 aa, synthetic construct
TGGALI

SEQ ID NO: 9539 - protein, 11 aa, synthetic construct
TTVGHLDNRFR

SEQ ID NO: 9540 - protein, 10 aa, synthetic construct
IMFIVMQGFK

SEQ ID NO: 9541 - protein, 8 aa, synthetic construct
TTSVVQSD

SEQ ID NO: 9542 - protein, 7 aa, synthetic construct
TVRKRIS

SEQ ID NO: 9543 - protein, 9 aa, synthetic construct
SDMGTSGLA

SEQ ID NO: 9544 - protein, 11 aa, synthetic construct
TLFGLVGDGKR

SEQ ID NO: 9545 - protein, 8 aa, synthetic construct
TARRRLFS

SEQ ID NO: 9546 - protein, 10 aa, synthetic construct
VSIHRVDGFR

SEQ ID NO: 9547 - protein, 10 aa, synthetic construct
TAIYDNVFLR

SEQ ID NO: 9548 - protein, 8 aa, synthetic construct
VTLDRRKW

SEQ ID NO: 9549 - protein, 10 aa, synthetic construct
NGMSAEVRYR

SEQ ID NO: 9550 - protein, 13 aa, synthetic construct
IGTMRLPSKIVAP

SEQ ID NO: 9551 - protein, 14 aa, synthetic construct
TSVVCLDFVFQGFV

SEQ ID NO: 9552 - protein, 11 aa, synthetic construct
TSIVFVDRGLR

SEQ ID NO: 9553 - protein, 10 aa, synthetic construct
VVLGFRFEFT

SEQ ID NO: 9554 - protein, 8 aa, synthetic construct
TLVDRGFR

SEQ ID NO: 9555 - protein, 10 aa, synthetic construct
GVLCTDNNFV

SEQ ID NO: 9556 - protein, 8 aa, synthetic construct
VIVNYVFH

SEQ ID NO: 9557 - protein, 9 aa, synthetic construct
VAVVMAGFV

SEQ ID NO: 9558 - protein, 11 aa, synthetic construct
VLVVGSVLVFK

SEQ ID NO: 9559 - protein, 10 aa, synthetic construct
TVVLIGRGFS

SEQ ID NO: 9560 - protein, 9 aa, synthetic construct
TILVGRYLV

SEQ ID NO: 9561 - protein, 10 aa, synthetic construct
TLLVEVAKIR

SEQ ID NO: 9562 - protein, 11 aa, synthetic construct
TMLMSCNSVMR

SEQ ID NO: 9563 - protein, 9 aa, synthetic construct
TTVVNRGLA

SEQ ID NO: 9564 - protein, 10 aa, synthetic construct
TTVSVLLLFG

SEQ ID NO: 9565 - protein, 9 aa, synthetic construct
VNFSVAAFG

SEQ ID NO: 9566 - protein, 9 aa, synthetic construct
LFVVTWNFV

SEQ ID NO: 9567 - protein, 11 aa, synthetic construct
SMPSIYAIWAS

SEQ ID NO: 9568 - protein, 12 aa, synthetic construct
LYVMTRGIITII

SEQ ID NO: 9569 - protein, 9 aa, synthetic construct
IGVREHSVR

SEQ ID NO: 9570 - protein, 10 aa, synthetic construct
AILRDHCGLL

SEQ ID NO: 9571 - protein, 14 aa, synthetic construct
TVMIDKDGMVLGFM

SEQ ID NO: 9572 - protein, 9 aa, synthetic construct
TLLAPRCGD

SEQ ID NO: 9573 - protein, 9 aa, synthetic construct
TALSKHAFT

SEQ ID NO: 9574 - protein, 11 aa, synthetic construct
TSINRLILAFL

SEQ ID NO: 9575 - protein, 8 aa, synthetic construct
TSLSSRFV

SEQ ID NO: 9576 - protein, 9 aa, synthetic construct
TLINADRFM

SEQ ID NO: 9577 - protein, 10 aa, synthetic construct
TISGGTMRFV

SEQ ID NO: 9578 - protein, 12 aa, synthetic construct
TGWLDSVPFGFA

SEQ ID NO: 9579 - protein, 12 aa, synthetic construct
VMFRRWSGDGFV

SEQ ID NO: 9580 - protein, 10 aa, synthetic construct
SSFTVLSGVK

SEQ ID NO: 9581 - protein, 10 aa, synthetic construct
TVHVYGVRFV

SEQ ID NO: 9582 - protein, 8 aa, synthetic construct
TTVGVGLG

SEQ ID NO: 9583 - protein, 9 aa, synthetic construct
VMMQAHEFR

SEQ ID NO: 9584 - protein, 9 aa, synthetic construct
GVVGAQSFN

SEQ ID NO: 9585 - protein, 12 aa, synthetic construct
RPGQEWAQLMRV

SEQ ID NO: 9586 - protein, 9 aa, synthetic construct
VVWLRVLIR

SEQ ID NO: 9587 - protein, 9 aa, synthetic construct
AVLWGGLFG

SEQ ID NO: 9588 - protein, 10 aa, synthetic construct
TRIQVGCGFS

SEQ ID NO: 9589 - protein, 9 aa, synthetic construct
VCLVVFTFA

SEQ ID NO: 9590 - protein, 9 aa, synthetic construct
TGIVFGRIK

SEQ ID NO: 9591 - protein, 14 aa, synthetic construct
EKCAIMGMEHFTWN

SEQ ID NO: 9592 - protein, 9 aa, synthetic construct
LMMMDGLPV

SEQ ID NO: 9593 - protein, 8 aa, synthetic construct
VGMTRIFL

SEQ ID NO: 9594 - protein, 9 aa, synthetic construct
TKIEENVVR

SEQ ID NO: 9595 - protein, 9 aa, synthetic construct
VIFGVEHFG

SEQ ID NO: 9596 - protein, 8 aa, synthetic construct
TGIAASFY

SEQ ID NO: 9597 - protein, 8 aa, synthetic construct
VILSVGFV

SEQ ID NO: 9598 - protein, 13 aa, synthetic construct
IQGDGSGMYMAGR

SEQ ID NO: 9599 - protein, 11 aa, synthetic construct
TVFDREYTMFS

SEQ ID NO: 9600 - protein, 6 aa, synthetic construct
GQSCDV

SEQ ID NO: 9601 - protein, 10 aa, synthetic construct
TTIEGIVGFI

SEQ ID NO: 9602 - protein, 9 aa, synthetic construct
TIFMNAGFG

SEQ ID NO: 9603 - protein, 14 aa, synthetic construct
TGFIIDDVHNVHFQ

SEQ ID NO: 9604 - protein, 10 aa, synthetic construct
TTVKESVGFI

SEQ ID NO: 9605 - protein, 10 aa, synthetic construct
WDVLSSGAIT

SEQ ID NO: 9606 - protein, 13 aa, synthetic construct
GWFVSDVVIVLGQ

SEQ ID NO: 9607 - protein, 9 aa, synthetic construct
TVFDGEGFT

SEQ ID NO: 9608 - protein, 13 aa, synthetic construct
VTYGGTHATRRFS

SEQ ID NO: 9609 - protein, 14 aa, synthetic construct
TICLHDAPAGISFV

SEQ ID NO: 9610 - protein, 8 aa, synthetic construct
LIFNGVFV

SEQ ID NO: 9611 - protein, 10 aa, synthetic construct
TAVTSFGFFV

SEQ ID NO: 9612 - protein, 6 aa, synthetic construct
LVVNKI

SEQ ID NO: 9613 - protein, 8 aa, synthetic construct
TVLRGRFW

SEQ ID NO: 9614 - protein, 11 aa, synthetic construct
VVLNIGLARFV

SEQ ID NO: 9615 - protein, 9 aa, synthetic construct
TGLTQLKFV

SEQ ID NO: 9616 - protein, 9 aa, synthetic construct
TALALASFI

SEQ ID NO: 9617 - protein, 11 aa, synthetic construct
HHIGGPGLVVN

SEQ ID NO: 9618 - protein, 10 aa, synthetic construct
VAVTRTLRFM

SEQ ID NO: 9619 - protein, 8 aa, synthetic construct
LQVLSKVM

SEQ ID NO: 9620 - protein, 10 aa, synthetic construct
KGFSAIMRYV

SEQ ID NO: 9621 - protein, 9 aa, synthetic construct
TLFEVLGFL

SEQ ID NO: 9622 - protein, 9 aa, synthetic construct
VGIMGCRKI

SEQ ID NO: 9623 - protein, 11 aa, synthetic construct
SVMRLMDGHVL

SEQ ID NO: 9624 - protein, 11 aa, synthetic construct
SWFDEASVEFD

SEQ ID NO: 9625 - protein, 9 aa, synthetic construct
VSFGVAVFG

SEQ ID NO: 9626 - protein, 7 aa, synthetic construct
LVLRWWM

SEQ ID NO: 9627 - protein, 13 aa, synthetic construct
WQVVAGSHGVTFC

SEQ ID NO: 9628 - protein, 9 aa, synthetic construct
WTVVDMCVR

SEQ ID NO: 9629 - protein, 12 aa, synthetic construct
TLPQHIGYASFA

SEQ ID NO: 9630 - protein, 9 aa, synthetic construct
THVWSGRIG

SEQ ID NO: 9631 - protein, 11 aa, synthetic construct
TRFQRMGQQFT

SEQ ID NO: 9632 - protein, 9 aa, synthetic construct
TTSMRTYFQ

SEQ ID NO: 9633 - protein, 6 aa, synthetic construct
TCLDFD

SEQ ID NO: 9634 - protein, 10 aa, synthetic construct
SQITNELGLA

SEQ ID NO: 9635 - protein, 13 aa, synthetic construct
TCIDVVMQSVNIS

SEQ ID NO: 9636 - protein, 13 aa, synthetic construct
LHVGRSRGRAQLA

SEQ ID NO: 9637 - protein, 9 aa, synthetic construct
TGLVHDRFT

SEQ ID NO: 9638 - protein, 14 aa, synthetic construct
TAILIAGAGTSMFQ

SEQ ID NO: 9639 - protein, 9 aa, synthetic construct
MTWMMRTFV

SEQ ID NO: 9640 - protein, 10 aa, synthetic construct
TVMLNGPYLH

SEQ ID NO: 9641 - protein, 6 aa, synthetic construct
VSWRIR

SEQ ID NO: 9642 - protein, 14 aa, synthetic construct
TGITAHPASVRYFL

SEQ ID NO: 9643 - protein, 13 aa, synthetic construct
TDLVTSPNFFGKM

SEQ ID NO: 9644 - protein, 10 aa, synthetic construct
TSHRVNRGFI

SEQ ID NO: 9645 - protein, 10 aa, synthetic construct
TSFDMEYNVR

SEQ ID NO: 9646 - protein, 13 aa, synthetic construct
VVIGGTGRFGFVD

SEQ ID NO: 9647 - protein, 8 aa, synthetic construct
LAIGMVIM

SEQ ID NO: 9648 - protein, 9 aa, synthetic construct
TGFFVREFR

SEQ ID NO: 9649 - protein, 14 aa, synthetic construct
LKMIRRVGEIARFL

SEQ ID NO: 9650 - protein, 7 aa, synthetic construct
TLLVGFA

SEQ ID NO: 9651 - protein, 9 aa, synthetic construct
TLFQGSAFA

SEQ ID NO: 9652 - protein, 8 aa, synthetic construct
TTISVKKK

SEQ ID NO: 9653 - protein, 13 aa, synthetic construct
TAVLVHGWVVNIS

SEQ ID NO: 9654 - protein, 9 aa, synthetic construct
TAWSLVRFA

SEQ ID NO: 9655 - protein, 9 aa, synthetic construct
VLKSCVRFL

SEQ ID NO: 9656 - protein, 8 aa, synthetic construct
TLFLRMFF

SEQ ID NO: 9657 - protein, 12 aa, synthetic construct
FRLLVKVVVSFI

SEQ ID NO: 9658 - protein, 8 aa, synthetic construct
VRVDRGIG

SEQ ID NO: 9659 - protein, 9 aa, synthetic construct
VIIDTAAFV

SEQ ID NO: 9660 - protein, 10 aa, synthetic construct
TRMLSDFSRQ

SEQ ID NO: 9661 - protein, 8 aa, synthetic construct
LAVNVYVV

SEQ ID NO: 9662 - protein, 6 aa, synthetic construct
SLMNFK

SEQ ID NO: 9663 - protein, 9 aa, synthetic construct
TSVAIMSIF

SEQ ID NO: 9664 - protein, 12 aa, synthetic construct
TTFQPSGRMNFG

SEQ ID NO: 9665 - protein, 8 aa, synthetic construct
TRLIIYVE

SEQ ID NO: 9666 - protein, 11 aa, synthetic construct
LLSFAYVDDEV

SEQ ID NO: 9667 - protein, 9 aa, synthetic construct
ILREVCDFG

SEQ ID NO: 9668 - protein, 9 aa, synthetic construct
TVVCNNNFL

SEQ ID NO: 9669 - protein, 6 aa, synthetic construct
VTRGFS

SEQ ID NO: 9670 - protein, 9 aa, synthetic construct
TYLYVGQKV

SEQ ID NO: 9671 - protein, 11 aa, synthetic construct
TGITWVDGMQD

SEQ ID NO: 9672 - protein, 9 aa, synthetic construct
QPWGFDKNA

SEQ ID NO: 9673 - protein, 8 aa, synthetic construct
VIYNLRFA

SEQ ID NO: 9674 - protein, 9 aa, synthetic construct
VAMDIRGKL

SEQ ID NO: 9675 - protein, 11 aa, synthetic construct
TLVVLSLGTKV

SEQ ID NO: 9676 - protein, 10 aa, synthetic construct
VRLELGKAFV

SEQ ID NO: 9677 - protein, 9 aa, synthetic construct
TRFAGKGFV

SEQ ID NO: 9678 - protein, 11 aa, synthetic construct
CMLERSRLKFV

SEQ ID NO: 9679 - protein, 14 aa, synthetic construct
VTIIHSSNGDIDIV

SEQ ID NO: 9680 - protein, 9 aa, synthetic construct
TIVRRFDFQ

SEQ ID NO: 9681 - protein, 10 aa, synthetic construct
VAVVRGAGFS

SEQ ID NO: 9682 - protein, 9 aa, synthetic construct
FGFAGRSMW

SEQ ID NO: 9683 - protein, 9 aa, synthetic construct
TIFFAGLFC

SEQ ID NO: 9684 - protein, 14 aa, synthetic construct
TVFRIDSNLSSHFV

SEQ ID NO: 9685 - protein, 8 aa, synthetic construct
TKIAVNFQ

SEQ ID NO: 9686 - protein, 14 aa, synthetic construct
TDLRKQGASVFAFR

SEQ ID NO: 9687 - protein, 9 aa, synthetic construct
TSLDGHVFN

SEQ ID NO: 9688 - protein, 8 aa, synthetic construct
VVVGERFR

SEQ ID NO: 9689 - protein, 6 aa, synthetic construct
VNARIV

SEQ ID NO: 9690 - protein, 10 aa, synthetic construct
TAFHPSIYFC

SEQ ID NO: 9691 - protein, 10 aa, synthetic construct
STISRSVHLA

SEQ ID NO: 9692 - protein, 9 aa, synthetic construct
VYVHKSFFL

SEQ ID NO: 9693 - protein, 8 aa, synthetic construct
TVVADGIY

SEQ ID NO: 9694 - protein, 10 aa, synthetic construct
TVLHQRGRFG

SEQ ID NO: 9695 - protein, 10 aa, synthetic construct
TILEGRAQFK

SEQ ID NO: 9696 - protein, 13 aa, synthetic construct
TVFYSGSGKYYIR

SEQ ID NO: 9697 - protein, 9 aa, synthetic construct
VYFVNDCIV

SEQ ID NO: 9698 - protein, 4 aa, synthetic construct
LPFL

SEQ ID NO: 9699 - protein, 10 aa, synthetic construct
SVLESRLSKQ

SEQ ID NO: 9700 - protein, 12 aa, synthetic construct
TSLFVGVRYRFV

SEQ ID NO: 9701 - protein, 117 aa, synthetic construct
EVQLVESGGGLVQAGDSLRLSCTASGNINVRYYMGWFRQAPGKEREFVASISMMRRVTYYADSVKGRFTISRDDARNTVYLQMNSLKPEDTAVYYCNMLVANTGEYWGQGTQVTVSS

SEQ ID NO: 9702 - protein, 120 aa, synthetic construct
EVQLVESGGGLVQAGDSLRLSCTASGIVGPVLEMGWFRQAPGKEREFVASISSIGVYTYYADSVKGRFTISRDDARNTVYLQMNSLKPEDTAVYYCNVTCWLHGGMTEYWGQGTQVTVSS

SEQ ID NO: 9703 - protein, 125 aa, synthetic construct
EVQLVESGGGLVQAGDSLRLSCTASGDAVNWQVMGWFRQAPGKEREFVASISNGMALTYYADSVKGRFTISRDDARNTVYLQMNSLKPEDTAVYYCNVYYFVMDWNTQCDLVEYWGQGTQVTVSS

SEQ ID NO: 9704 - protein, 117 aa, synthetic construct
EVQLVESGGGLVQAGDSLRLSCTASGGLAHVFRMGWFRQAPGKEREFVASISVVETGTYYADSVKGRFTISRDDARNTVYLQMNSLKPEDTAVYYCNVLTIRIHEYWGQGTQVTVSS

SEQ ID NO: 9705 - protein, 120 aa, synthetic construct
EVQLVESGGGLVQAGDSLRLSCTASGSLNEWIVMGWFRQAPGKEREFVASISDEGTLTYYADSVKGRFTISRDDARNTVYLQMNSLKPEDTAVYYCNVFVWDDVGLVEYWGQGTQVTVSS

SEQ ID NO: 9706 - protein, 120 aa, synthetic construct
EVQLVESGGGLVQAGDSLRLSCTASGMYATAIEMGWFRQAPGKEREFVASISRRDAYTYYADSVKGRFTISRDDARNTVYLQMNSLKPEDTAVYYCNVDIIEHHHLAEYWGQGTQVTVSS

SEQ ID NO: 9707 - protein, 122 aa, synthetic construct
EVQLVESGGGLVQAGDSLRLSCTASGTSRLVFEMGWFRQAPGKEREFVASISVFEPDTYYADSVKGRFTISRDDARNTVYLQMNSLKPEDTAVYYCNVLVADNVHLAISEYWGQGTQVTVSS

SEQ ID NO: 9708 - protein, 120 aa, synthetic construct
EVQLVESGGGLVQAGDSLRLSCTASGPARALARMGWFRQAPGKEREFVASISGSGLNTYYADSVKGRFTISRDDARNTVYLQMNSLKPEDTAVYYCNVRVRVIDGVLEYWGQGTQVTVSS

SEQ ID NO: 9709 - protein, 120 aa, synthetic construct
EVQLVESGGGLVQAGDSLRLSCTASGSALMLEVMGWFRQAPGKEREFVASISDDPILTYYADSVKGRFTISRDDARNTVYLQMNSLKPEDTAVYYCNVIVFTDEGLREYWGQGTQVTVSS

SEQ ID NO: 9710 - protein, 124 aa, synthetic construct
EVQLVESGGGLVQAGDSLRLSCTASGIIVPGVEMGWFRQAPGKEREFVASISGPQRDTYYADSVKGRFTVSRDDARNTVYLQMNSLKPEDTAVYYCNVLFSIDTALDLGMQEYWGQGTQVTVSS

SEQ ID NO: 9711 - protein, 118 aa, synthetic construct
EVQLVESGGGLVQAGDSLRLSCTASGLGQKTPDMGWFRQAPGKEREFVASISVLAAYTYYADSVKGRFTISRDDARNTVYLQMNSLKPEDTAVYYCNVFLHGSGDEYWGQGTQVTVSS

SEQ ID NO: 9712 - protein, 121 aa, synthetic construct
EVQLVESGGGLVQAGDSLRLSCTASGAISKLIWMGWFRQAPGKEREFVASISGHSGHTYYADSVKGRFTISRDDARNTVYLQMNSLKPEDTAVYYCNVIIEEDYFHVAEYWGQGTQVTVSS

SEQ ID NO: 9713 - protein, 120 aa, synthetic construct
EVQLVESGGGLVQAGDSLRLSCTASGYDSELVFMGWFRQAPGKEREFVAISDVRPHTYYADSVKGRFTISRDDARNTVYLQMNSLKPEDTAVYYCNVLLPVIGVNGTEYWGQGTQVTVSS

SEQ ID NO: 9714 - protein, 120 aa, synthetic construct
EVQLVESGGGLVQAGDSLRLSCTASGQCGTMLWMGWFRQAPGKEREFVASISAPRLNTYYADSVKGRFTISRDDARNTVYLQMNSLKPEDTAVYYCNVWVLGSIYVEEYWGQGTQVTVSS

SEQ ID NO: 9715 - protein, 121 aa, synthetic construct
EVQLVESGGGLVQAGDSLRLSCTASGAANGMTWMGWFRQAPGKEREFVASISRRGVRTYYADSVKGRFTISRDDARNTVYLQMNSLKPEDTAVYYCNVEEWISEFRAREYWGQGTQVTVSS

SEQ ID NO: 9716 - protein, 124 aa, synthetic construct
EVQLVESGGGLVQAGDSLRLSCTASGRVKGMMEMGWFRQAPGKEREFVASISVQKLYTYYADSVKGRFTISRDDARNTVYLQMNSLKPEDTAVYYCNVSIWDTSDLRIGVREYWGQGTQVTVSS

SEQ ID NO: 9717 - protein, 120 aa, synthetic construct
EVQLVESGGGLVQAGDSLRLSCTASGGLTLGRWMGWFRQAPGKEREFVAVSNVVWGTYYADSVKGRFTISRDDARNTVYLQMNSLKPEDTAVYYCNVAVDRNVSGIDEYWGQGTQVTVSS

SEQ ID NO: 9718 - protein, 117 aa, synthetic construct
EVQLVESGGGLVQAGDSLRLSCTASGVIVADMPMGWFRQAPGKEREFVAMDGWATYYADSVKGRFTISRDDARNTVYLQMNSLKPEDTAVYYCNILWGVGPFPIEYWGQGTQVTVSS

SEQ ID NO: 9719 - protein, 116 aa, synthetic construct
EVQLVESGGGLVQAGDSLRLSCTASGLAVMGWFRQAPGKEREFVASISDLWTGTYYADSVKGRFTISRDDARNTVYLQMNSLKPEDTAVYYCNVNSVSSDVRREYWGQGTQVTVSS

SEQ ID NO: 9720 - protein, 114 aa, synthetic construct
EVQLVESGGGLVQAGDSLRLSCTASGKQCVLRVMGWFRQAPGKEREFVAALAWDTYYADSVKGRFTISRDDARNTVYLQMNSLKPEDTAVYYCWMESDVLDEYWGQGTQVTVSS

SEQ ID NO: 9721 - protein, 111 aa, synthetic construct
EVQLVESGGGLVQAGDSLRLSCTASGDLTDRAFMGWFRQAPGKEREFVAIIMLGCTYYADSVKGRFTISRDDARNTVYLQMNSLKPEDTAVYYCNVDLEYWGQGTQVTVSS

SEQ ID NO: 9722 - protein, 119 aa, synthetic construct
EVQLVESGGGLVQAGDSLRLSCTASGLRMMDAHMGWFRQAPGKEREFVALSSVWADTYYADSVKGRFTISRDDARNTVYLQMNSLKPEDTAVYYCNVTDQSSESRQEYWGQGTQVTVSS

SEQ ID NO: 9723 - protein, 116 aa, synthetic construct
EVQLVESGGGLVQAGDSLRLSCTASGVPRAVDVMGWFRQAPGKEREFVASLFFGDTYYADSVKGRFTISRDDARNTVYLQMNSLKPEDTAVYYCNVIIRPDSDEYWGQGTQVTVSS

SEQ ID NO: 9724 - protein, 111 aa, synthetic construct
EVQLVESGGGLVQAGDSLRLSCTASGHGIDTSFMGWFRQAPGKEREFVAVYLAGGTYYADSVKGRFTISRDDARNTVYLQMNSLKPEDTAVYYCNVMIEYWGQGTQVTVSS

SEQ ID NO: 9725 - protein, 111 aa, synthetic construct
EVQLVESGGGLVQAGDSLRLSCTASGKDLHKSFMGWFRQAPGKEREFVAIMMFQDTYYADSVKGRFTISRDDARNTVYLQMNSLKPEDTAVYYYNVDLEYWGQGTQVTVSS

SEQ ID NO: 9726 - protein, 111 aa, synthetic construct
EVQLVESGGGLVQAGDSLRLSCTASGWEADVVHMGWFRQAPGKEREFVAVIINGGTYYADSVKGRFTISRDDARNTVYLQMNSLKPEDTAVYYCNVMLEYWGQGTQVTVSS

SEQ ID NO: 9727 - protein, 112 aa, synthetic construct
EVQLVESGGGLVQAGDSLRLSCTASGHYAFAGYMGWFRQAPGKEREFVAIYMLDDDTYYADSVKGRFTISRDDARNTVYLQMNSLKPEDTAVYYCNVGVEYWGQGTQVTVSS

SEQ ID NO: 9728 - protein, 121 aa, synthetic construct
EVQLVESGGGLVQAGDSLRLSCTASGIRGLVLWMGWFRQAPGKEREFVASISIGYGDTYYADSVKGRFTISRDDARNTVYLQMNSLKPEDTAVYYCNVLGLMARGSEFEYWGQGTQVTVSS

SEQ ID NO: 9729 - protein, 118 aa, synthetic construct
EVQLVESGGGLVQAGDSLRLSCTASGIEEMDVIMGWFRQAPGKEREFVASISDDPVLTYYADSVKGRFTISRDDARNTVYLQMNSLKPEDTAVYTATVVSIELVAEYWGQGTQVTVSS

SEQ ID NO: 9730 - protein, 120 aa, synthetic construct
EVQLVESGGGLVQAGDSLRLSCTASGHGWNIVEMGWFRQAPGKEREFVASISGRGVYTYYADSVKGRFTISRDDARNTVYLQMNSLKPEDTAVYYCNVSIIQDRLFVEYWGQGTQVTVSS

SEQ ID NO: 9731 - protein, 120 aa, synthetic construct
EVQLVESGGGLVQAGDSLRLSCTASGQSGHEIEMGWFRQAPGKEREFVASISVGRVGTYYADSVKGRFTISRDDARNTVYLQMNSLKPEDTAVYYCNVTVFCKTGFKEYWGQGTQVTVSS

SEQ ID NO: 9732 - protein, 120 aa, synthetic construct
EVQLVESGGGLVQAGDSLRLSCTASGGFVGLVIMGWFRQAPGKEREFVASISSVRDITYYADSVKGRFTISRDDARNTVYLQMNSLKPEDTAVYYCNVLVLEAFANQEYWGQGTQVTVSS

SEQ ID NO: 9733 - protein, 121 aa, synthetic construct
EVQLVESGGGLVQAGDSLRLSCTASGEGGSVEYMGWFRQAPGKEREFVASISAKGRITYYADSVKGRFTISRDDARNTVYLQMNSLKPEDTAVYYCNVGMHIKAVFILEYWGQGTQVTVSS

SEQ ID NO: 9734 - protein, 118 aa, synthetic construct
EVQLVESGGGLVQAGDSLRLSCTASGNVDRIMKMGWFRQAPGKEREFVASISGDRRVTYYADSVKGRFTISRDDARNTVYLQMNSLKPEDTAVYYCNVLMVTPIMEYWGQGTQVTVSS

SEQ ID NO: 9735 - protein, 119 aa, synthetic construct
EVQLVESGGGLVQAGDSLRLSCTASGDMDGILEMGWFRQAPGKEREFVASISRVGRSTYYADSVKGRFTISRDDARNTVYLQMNSLKPEDTAVYYCNVSAMRVMKMEYWGQGTQVTVSS

SEQ ID NO: 9736 - protein, 117 aa, synthetic construct
EVQLVESGGGLVQAGDSLRLSCTASGSQRMWMEMGWFRQAPGKEREFVASISVRRVYTYYADSVKGRFTISRDDARNTVYLQMNSLKPEDTAVYYCNVVNECFDEYWGQGTQVTVSS

SEQ ID NO: 9737 - protein, 119 aa, synthetic construct
EVQLVESGGGLVQAGDSLRLSCTASGLPGGMLEMGWFRQAPGKEREFVASISGQGGYTYYADSVKGRFTISRDDARNTVYLQMNSLKPEDTAVYYCNVTYLELVFAEYWGQGTQVTVSS

SEQ ID NO: 9738 - protein, 119 aa, synthetic construct
EVQLVESGGGLVQAGDSLRLSCTASGHASGILEMGWFRQAPGKEREFVASISVRAGETYYADSVKGRFTISRDDARNTVYLQMNSLKPEDTAVYYCNVTEFKERFFEYWGQGTQVTVSS

SEQ ID NO: 9739 - protein, 122 aa, synthetic construct
EVQLVESGGGLVQAGDSLRLSCTASGFDGSILEMGWFRQAPGKEREFVASISMSASYTYYADSVKGRFTISRDDARNTVYLQMNSLKPEDTAVYYCNVSAIVVLIGRLREYWGQGTQVTVSS

SEQ ID NO: 9740 - protein, 120 aa, synthetic construct
EVQLVESGGGLVQAGDSLRLSCTASGACSDYIEMGWFRQAPGKEREFVASISGGGAYTYYADSVKGRFTISRDDARNTVYLQMNSLKPEDTAVYYCNAVVIVLGGKLEYWGQGTQVTVSS

SEQ ID NO: 9741 - protein, 120 aa, synthetic construct
EVQLVESGGGLVQAGDSLRLSCTASGGYHDVIEMGWFRQAPGKEREFVASISGSALYTYYADSVKGRFTISRDDARNTVYLQMNSLKPEDTAVYYCNVVNIGIGGFREYWGQGTQVTVSS

SEQ ID NO: 9742 - protein, 122 aa, synthetic construct
EVQLVESGGGLVQAGDSLRLSCTASGINGGLMEMGWFRQAPGKEREFVASISWFAAYTYYADSVKGRFTISRDDARNTVYLQMNSLKPEDTAVYYCNVVAVRKIPIVINEYWGQGTQVTVSS

SEQ ID NO: 9743 - protein, 120 aa, synthetic construct
EVQLVESGGGLVQAGDSLRLSCTASGGGARVMEVGWFRQAPGKEREFVASISGVDVFTYYADSVKGRFTISRDDARNTVYLQMNSLKPEDTAVYYCNVTGVVLGYFVEYWGQGTQVTVSS

SEQ ID NO: 9744 - protein, 122 aa, synthetic construct
EVQLVESGGGLVQAGDSLRLSCTASGHVADSLEMGWFRQAPGKEREFVASISVRKVYTYYADSVKGRFTISRDDARNTVYLQMNSLKPEDTAVYYCNVTFWPVLVCRCVEYWGQGTQVTVSS

SEQ ID NO: 9745 - protein, 120 aa, synthetic construct
EVQLVESGGGLVQAGDSLRLSCTASGTVGRVMEMGWFRQAPGKEREFVASISEGNMYTYYADSVKGRFTISRDDARNTVYLQMNSLKPEDTAVYYCNVWRIEKQLFDEYWGQGTQVTVSS

SEQ ID NO: 9746 - protein, 119 aa, synthetic construct
EVQLVESGGGLVQAGDSLRLSCTASGKVSDLLEMGWFRQAPGKEREFVASISGAWWYTYYADSVKGRFTISRDDARNTVYLQMNSLKPEDTAVYYCNVTSFGGRCHEYWGQGTQVTVSS

SEQ ID NO: 9747 - protein, 122 aa, synthetic construct
EVQLVESGGGLVQAGDSLRLSCTASGMVSNIIEMGWFRQAPGKEREFVASISRNVRYTYYADSVKGRFTISRDDARNTVYLQMNSLKPEDTAVYYCNVVYQDWAEGRFLEYWGQGTQVTVSS

SEQ ID NO: 9748 - protein, 117 aa, synthetic construct
EVQLVESGGGLVQAGDSLRLSCTASGRVQVYGWMGWFRQAPGKERELVASISGPARITYYADSVKGRFTISRDDARNTVYLQMNSLKPEDTAVYYCNVPHYWMLEYWGQGTQVTVSS

SEQ ID NO: 9749 - protein, 122 aa, synthetic construct
EVQLVESGGGLVQAGDSLRLSCTASGGADGILVEMGWFRQAPGKEREFVASISMYGDYTYYADSVKGRFRISRDDARNTVYLQMNSLKPEDTAVYYCNVCSLIISSGFAEYWGQGTQVTVSS

SEQ ID NO: 9750 - protein, 120 aa, synthetic construct
EVQLVESGGGLVQAGDSLRLSCTASGGMSDCLEMGWFRQAPGKEREFVASISWNEKYTYYADSVKGRFTISRDDARNTVYLQMNSLKPEDTAVYYCNVTRLDTAGVQEYWGQGTQVTVSS

SEQ ID NO: 9751 - protein, 123 aa, synthetic construct
EVQLVESGGGLVQAGDSLRLSCTASGMIINILEMGWFRQAPGKEREFVASISYHGGITYYADSVKGRFTISRDDARNTVYLQMNSLKPEDTAVYYCNVTGMCLVPVLFFVEYWGQGTQVTVSS

SEQ ID NO: 9752 - protein, 121 aa, synthetic construct
EVQLVESGGGLVQAGDSLRLSCTASGMTRNLIEMGWFRQAPGKEREFVASISVMVQYTYYADSVKGRFTISRDDARNTVYLQMNSLKPEDTAVYYCNVTGVSGNNGFHEYWGQGTQVTVSS

SEQ ID NO: 9753 - protein, 117 aa, synthetic construct
EVQLVESGGGLVQAGDSLRLSCTASGDIVKMVEMGWFRQAPGKEREFVASISGSCTYTYYADSVKGRFTISRDDARNTVYLQMNSLKPEDTAVYYCNVVVWPIHEYWGQGTQVTVSS

SEQ ID NO: 9754 - protein, 121 aa, synthetic construct
EVQLVESGGGLVQAGDSLRLSCTASGDRDAFLEMGWFRQAPGKEREFVASISRIVDMTYYADSVKGRFTISRDDARNTVYLQMNSLKPEDTAVYYCNVTSFQSRVGFVEYWGQGTQVTVSS

SEQ ID NO: 9755 - protein, 118 aa, synthetic construct
EVQLVESGGGLVQAGDSLRLSCTASGVLGHVIEMGWFRQAPGKEREFVASISGDNTYTYYADSVKGRFTISRDDARNTVYLQMNSLKPEDTAVYYCNVLLSPSLKEYWGQGTQVTVSS

SEQ ID NO: 9756 - protein, 121 aa, synthetic construct
EVQLVESGGGLVQAGDSLRLSCTASGSSGRFIEMGWFRQAPGKEREFVASISGHIMYTYYADSVKGRFTISRDDARNTVYLQMNSLKPEDTAVYYCNVTVVNEKRRFWEYWGQGTQVTVSS

SEQ ID NO: 9757 - protein, 121 aa, synthetic construct
EVQLVESGGGLVQAGDSLRLSCTASGSIFVFKNMGWFRQAPGKEREFVASISGFHGTTYYADSVKGRFTISRDDARNTVYLQMNSLKPEDTAVYYCNVLGRIDGLNNPEYWGQGTQVTVSS

SEQ ID NO: 9758 - protein, 119 aa, synthetic construct
EVQLVESGGGLVQAGDSLRLSCTASGQNNVIIEMGWFRQAPGKEREFVASISNADIYTYYADSVKGRFTISRDDARNTVYLQMNSLKPEDTAVYYCNVVVYAVRFHEYWGQGTQVTVSS

SEQ ID NO: 9759 - protein, 122 aa, synthetic construct
EVQLVESGGGLVQAGDSLRLSCTASGDSGAYVEMGWFRQAPGKEREFVASISGMTSYTYYADSVKGRFTISRDDARNTVYLQMNSLKPEDTAVYYCNVWMLVVQRHRLQEYWGQGTQVTVSS

SEQ ID NO: 9760 - protein, 120 aa, synthetic construct
EVQLVESGGGLVQAGDSLRLSCTASGRIDRVIEMGWFRQAPGKEREFVASISWDSITYYADSVKGRFTISRDDARNTVYLQMNSLKPEDTAVYYCNVTIRTAYSMFGEYWGQGTQVTVSS

SEQ ID NO: 9761 - protein, 120 aa, synthetic construct
EVQLVESGGGLVQAGDSLRLSCTASGVIKVAIEMGWFRQAPGKEREFVASISVSDGLTYYADSVKGRFTISRDDARNTVYLQMNSLKPEDTAVYYCNVTSMMHMRFFEYWGQGTQVTVSS

SEQ ID NO: 9762 - protein, 119 aa, synthetic construct
EVQLVESGGGLVQAGDSLRLSCTASGCRGRHIEMGWFRQAPGKEREFVASISQADDITYYADSVKGRFTISRDDARNTVYLQMNSLKPEDTAVYYCNVTVFMNGFVEYWGQGTQVTVSS

SEQ ID NO: 9763 - protein, 120 aa, synthetic construct
EVQLVESGGGLVQAGDSLRLSCTASGPGRSVMEMGWFRQAPGKEREFVASISGKHSYTYYADSIKGRFTISRDDARNTVYLQMNSLKPEDTAVYYCNVTVWQHIHMMEYWGQGTQVTVSS

SEQ ID NO: 9764 - protein, 120 aa, synthetic construct
EVQLVESGGGLVQAGDSLRLSCTASGDMRDSLEMGWFRQAPGKEREFVASISVSHMYTYYADSVKGRFTISRDDARNTVYLQMNSLKPEDTAVYYCNVSSLATDGVREYWGQGTQVTVSS

SEQ ID NO: 9765 - protein, 120 aa, synthetic construct
EVQLVESGGGLVQAGDSLRLSCTASGVVGFMLEMGWFRQAPGKEREFVASISNDRIYTYYADSVKGRFTISRDDARNTVYLQMNSLKPEDTAVYYCNVVSYGEFGIVEYWGQGTQVTVSS

SEQ ID NO: 9766 - protein, 121 aa, synthetic construct
EVQLVESGGGLVQAGDSLRLSCTASGLMMRVLEMGWFRQAPGKEREFVASISGSGSNTYYADSVKGRFTISRDDARNTVYLQMNSLKPEDTAVYYCNVTCVRDLGLFVEYWGQGTQVTVSS

SEQ ID NO: 9767 - protein, 120 aa, synthetic construct
EVQLVESGGGLVQAGDSLRLSCTASGIVRRPIEMGWFRQAPDKEREFVASISGIEEYTYYADSVTGRFTISRDDARNTVYLQMNSLKPEDTAVYYCNVVVHNGGWFIEYWGQGTQVTVSS

SEQ ID NO: 9768 - protein, 119 aa, synthetic construct
EVQLVESGGGLVQAGDSLRLSCTASGLVERLVEMGWFRQAPGKEREFVASISRGVRYTYYADSVKGRFTISRDDARNTVYLQMNSLKPEDTAVYYCNVTAIGVTFTEYWGQGTQVTVSS

SEQ ID NO: 9769 - protein, 121 aa, synthetic construct
EVQLVESGGGLVQAGDSLRLSCTASGVNNTTIEMGWFRQAPGKEREFVASISGRGENTYYADSVKGRFTISRDDARNTVYLQMNSLKPEDTAVYYCNVVTWSVLTLFGKYWGQGTQVTVSS

SEQ ID NO: 9770 - protein, 120 aa, synthetic construct
EVQLVESGGGLVQAGDSLRLSCTASGGKQVLVEMGWFRQAPGKEREFVASISKGQVYTYYADSVKGRFTISRDDARNTVYLQMNSLKPEDTAVYYCNVVAMSVRGFREYWGQGTQVTVSS

SEQ ID NO: 9771 - protein, 116 aa, synthetic construct
EVQLVESGGGLVQAGDSLRLSCTASGGEDMGYMMGWFRQAPGKEREFVAYILGQIVTYYADSVKGRFTISRDDARNTVYLQMNSLKPEDTAVYYCNVLCKMVEEYWGQGTQVTVSS

SEQ ID NO: 9772 - protein, 120 aa, synthetic construct
EVQLVESGGGLVQAGDSLRLSCTASGLVYRRLHMGWFRQAPGKEREFVASISSDLEGTYYADSVKGRFTISRDDARNTVYLQMNSLKPEDTAVYYCNVMVIGLVSWAEYWGQGTQVTVSS

SEQ ID NO: 9773 - protein, 120 aa, synthetic construct
EVQLVESGGGLVQAGDSLRLSCTASGRAGLVMEMGWFRQAPGKEREFVASISVKDDGTYYADSVKGRFTISRDDARNTVYLQMNSLKPEDTAVYYCNVTAYCTLNFVEYWGQGTQVTVSS

SEQ ID NO: 9774 - protein, 119 aa, synthetic construct
EVQLVESGGGLVQAGDSLRLSCTASGIDRHLLEMGWFRQAPGKEREFVASISGNYGMTYYADSVKGRFTISRDDARNTVYLQMNSLKPEDTAVYYCNVTVLVYTFIEYWGQGTQVTVSS

SEQ ID NO: 9775 - protein, 119 aa, synthetic construct
EVQLVESGGGLVQAGDSLRLSCTASGKDRYAIEMGWFRQAPGKEREFVASISGFHGTTYYADSVKGRFTISRDAARNTVYLQMNSLKPEDTAVYYCNVIRETMQVIEYWGQGTQVTVSS

SEQ ID NO: 9776 - protein, 120 aa, synthetic construct
EVQLVESGGGLVQAGDSLRLSCTASGAHTFPVDMGWFRQAPGKEREFVASISNVVGYTYYADSVKGRFTISRDDARNTVYLQMNSLKPEDTAVYYCNVWYLWDIGFVEYWGQGTQVTVSS

SEQ ID NO: 9777 - protein, 120 aa, synthetic construct
EVQLVESGGGLVQAGDSLRLSCTASGLIGGAVEMGWFRQAPGKEREFVASISGRMTYTYYADSVKGRFTISRDDARNTVYLQMNSLKPEDTAVYYCNVTAMPNISFVEYWGQGTQVTVSS

SEQ ID NO: 9778 - protein, 119 aa, synthetic construct
EVQLVESGGGLVQAGDSLRLSCTASGRMRKFLEMGWFRQAPGKEREFVASISNVGGYTYYADSVKGRFTISRDDTRNTVYLQMNSLKPEDTAVYYCNVTVIYNGFVEYWGQGTQVTVSS

SEQ ID NO: 9779 - protein, 121 aa, synthetic construct
EVQLVESGGGLVQAGDSLRLSCTASGVLGTGQLMGWFRQAPGKEREFVASISRLARGTYYADSVKGRFTISRDDARNTVYLQMNSLKPEDTAVYYCNVKGDGEGTLVWEYWGQGTQVTVSS

SEQ ID NO: 9780 - protein, 120 aa, synthetic construct
EVQLVESGGGLVQAGDSLRLSCTASGTLGVMMEMGWFRQAPGKEREFVASISVSNGATYYADSVKGRFTISRDDARNTVYLQMNSLKPEDTAVYYCNVTVFRVNFKVEYWGQGTQVTVSS

SEQ ID NO: 9781 - protein, 120 aa, synthetic construct
EVQLVESGGGLVQAGDSLRLSCTASGRHQTMLEMGWFRQAPGKEREFVASISMMAFYTYYADSVKGRFTISRDDARNTVYLQMNSLKPEDTAVYYCNVTVINKSVIAEYWGQGTQVTVSS

SEQ ID NO: 9782 - protein, 120 aa, synthetic construct
EVQLVESGGGLVQAGDSLRLSCTASGCTEMALGMGWFRQAPGKEREFVASISIPAMETYYADSVKGRFTISRDDARNTVYLQMNSLKPEDTAVYYCNVTTVMARGFREYWGQGTQVTVSS

SEQ ID NO: 9783 - protein, 118 aa, synthetic construct
EVQLVESGGGLVQAGDSLRLSCTASGVINTVLEMGWFRQAPGKEREFVASISGGADYTYYADSVKGRFTISRDDARNTVYLQMNSLKPEDTAVYYCNVTMLMEFVEYWGQGTQVTVSS

SEQ ID NO: 9784 - protein, 120 aa, synthetic construct
EVQLVESGGGLVQAGDSLRLSCTASGVIGYVLEMGWFRQAPGKEREFVASISGRTDYTYYADSVKGRFTISRDDARNTVYLQMNSLKPEDTAVYYCNVTLLHKASVLEYWGQGTQVTVSS

SEQ ID NO: 9785 - protein, 122 aa, synthetic construct
EVQLVESGGGLVQAGDSLRLSCTASGISDRILEMGWFRQAPGKEREFVASISHSGDMTYYADSVKGRFTISRDDARNTVYLQMNSLKPEDTAVYYCNVTALTLYDYTFREYWGQGTQVTVSS

SEQ ID NO: 9786 - protein, 120 aa, synthetic construct
EVQLVESGGGLVQAGDSLRLSCTASGNEGLGIEMGWFRQAPGKEREFVASISMRDGGTYYADSVKGRFTISRDDARNTVYLQMNSLKPEDTAVYYCNVTIFDTICFSEYWGQGTQVTVSS

SEQ ID NO: 9787 - protein, 120 aa, synthetic construct
EVQLVESGGGLVQAGDSLRLSCTASGTIDLVMFMDWFRQAPGKEREFVASISANNVYTYYADSVKGRFTISRDDARNTVYLQMNSLKPEDTAVYYCNVMYVVGTSFVEYWGQGTQVTVSS

SEQ ID NO: 9788 - protein, 120 aa, synthetic construct
EVQLVESGGGLVQAGDSLRLSCTASGREEVTNVMGWFRQAPGKEREFVASISKDIRFTYYADSVKGRFTISRDDARNTVYLQMNSLKPEDTAVYYCNVVSVTFRTFREYWGQGTQVTVSS

SEQ ID NO: 9789 - protein, 119 aa, synthetic construct
EVQLVESGGGLVQAGDSLRLSCTASGFNDGYLEMGWFRQAPGKEREFVASISIGGGYTYYADSVKGRFTISRDDARNTVYLQMNSLKPEDTAVYYCNVLIFDVEFLEYWGQGTQVTVSS

SEQ ID NO: 9790 - protein, 119 aa, synthetic construct
EVQLVESGGGLVQAGDSLRLSCTASGGTGLMLEMGWFRQAPGKEREFVASISGRLRSTYYADSVKGRFTISRDDARNTVYLQMNSLKPEDTAVYYCNVTVFINGFREYWGQGTQVTVSS

SEQ ID NO: 9791 - protein, 120 aa, synthetic construct
EVQLVESGGGLVQAGDSLRLSCTASGAVASCLEMGWFRQAPGKEREFVASISVSLGETYYADSVKGRFTISRDDARNTVYLQMNSLKPEDTAVYYCNVTTFDQGAFFEYWGQGTQVTVSS

SEQ ID NO: 9792 - protein, 118 aa, synthetic construct
EVQLVESGGGLVQAGDSLRLSCTASGRVIIEMGWFRQAPGKEREFVASISTQCDYTYYADSVKGRFTISRDDARNTVYLQMNSLKPEDTAVYYCNVALITPVGFVEYWGQGTQVTVSS

SEQ ID NO: 9793 - protein, 124 aa, synthetic construct
EVQLVESGGGLVQAGDSLRLSCTASGNGHQVIEMGWFRQAPGKEREFVASISRSGSYTYYADSVKGRFTISRDDARNTVYLQMNSLKPEDTAVYYCNVLSVREDVIGFVVFEYWGQGTQVTVSS

SEQ ID NO: 9794 - protein, 121 aa, synthetic construct
EVQLVESGGGLVQAGDSLRLSCTASGVPGYLLEMGWFRQAPGKEREFVASISGDGFYTYYADSVKGRFTISRDDARNTVYLQMNSLKPEDTAVYYCNVVVCVECCVFREYWGQGTQVTVSS

SEQ ID NO: 9795 - protein, 121 aa, synthetic construct
EVQLVESGGGLVQAGDSLRLSCTASGVMGVVIEMGWFRQAPGKEREFVASISGVNDYTYYADSVKGRFTISRDDARNTVYLQMNSLKPEDTAVYYCNVTAHGCIMHIREYWGQGTQVTVSS

SEQ ID NO: 9796 - protein, 124 aa, synthetic construct
EVQLVESGGGLVQAGDSLRLSCTASGPGANMLEMGWFRQAPGKEREFVASISVQHYSTYYADSVKGRFTISRDDARNTVYLQMNSLKPEDTAVYYCNVTACLRRMVGMTFVEYWGQGTQVTVSS

SEQ ID NO: 9797 - protein, 120 aa, synthetic construct
EVQLVESGGGLVQAGDSLRLSCTASGEVTGMLEMGWFRQAPGKEREFVASISNRGQSTYYADSVKGRFTISRDDARNTVYLQMNSLKPEDTAVYYCNVTVVRPRVICEYWGQGTQVTVSS

SEQ ID NO: 9798 - protein, 122 aa, synthetic construct
EVQLVESGGGLVQAGDSLRLSCTASGEGVCVIEMGWFRQAPGKEREFVASISGYGVYTYYADSVKGRFTISRDDARNTVYLQMNSLKPEDTAVYYCNVVYLVVRNHEIEEYWGQGTQVTVSS

SEQ ID NO: 9799 - protein, 116 aa, synthetic construct
EVQLVESGGGLVQAGDSLRLSCTASGSRGGPMGWFRQAPGKEREFVASISDGEFGTYYADSVKGRFTISRDDARNTVYLQMNSLKPEDTAVYYCNVLRAIWGVEYWGQGTQVTVSS

SEQ ID NO: 9800 - protein, 120 aa, synthetic construct
EVQLVESGGGLVQAGDSLRLSCTASGNRALVTEMGWFRQAPGKEREFVASISGLGVYTYYADSVKGRFTISRDDARNTVYLQMNSLKPEDTAVYYCNVTRLGEMGFREYWGQGTQVTVSS

SEQ ID NO: 9801 - protein, 121 aa, synthetic construct
EVQLVESGGGLVQAGDSLRLSCTASGNLVKMLEMGWFRQAPGKEREFVASISGTATYTYYADSVKGRFTISRDDARNTVYLQMNSLKPEDTAVYYCNVVEFAVGLPRKEYWGQGTQVTVSS

SEQ ID NO: 9802 - protein, 119 aa, synthetic construct
EVQLVESGGGLVQAGDSLRLSCTASGMRGLVVEMGWFRQAPGKEREFVASISGMRQVTYYADSVKGRFTISRDDARNTVYLQMNSLKPEDTAVYYCNVTNFLSTFREYWGQGTQVTVSS

SEQ ID NO: 9803 - protein, 119 aa, synthetic construct
EVQLVESGGGLVQAGDSLRLSCTASGGTMGALEMGWFRQAPGKEREFVASISIARNYTYYADSVKGRFTISRDDARNTVYLQMNSLKPEDTAVYYCNVLVHHMGFQEYWGQGTQVTVSS

SEQ ID NO: 9804 - protein, 123 aa, synthetic construct
EVQLVESGGGLVQAGDSLRLSCTASGSKHSFLEMGWFRQAPGKEREFVASISCRVGLTYYADSVKGRFTISRDDARNTVYLQMNSLKPEDTAVYYCNVTCFGCETKFRFGEYWGQGTQVTVSS

SEQ ID NO: 9805 - protein, 122 aa, synthetic construct
EVQLVESGGGLVQAGDSLRLSCTASGTAKTLIEMGWFRQAPGKEREFVASISGFHQDTYYADSVKGRFTISRDDARNTVYLQMNSLKPEDTAVYYCNVVRGGFQTDERVEYWGQGTQATVSS

SEQ ID NO: 9806 - protein, 121 aa, synthetic construct
EVQLVESGGGLVQAGDSLRLSCTASGYIDGVVEMGWFRQAPGKEREFVASISGLGHYTYYADSVKGRFTISRDDARNTVYLQMNSLKPEDTAVYYCNVTAVKVGGALVEYWGQGTQVTVSS

SEQ ID NO: 9807 - protein, 123 aa, synthetic construct
EVQLVESGGGLVQAGDSLRLSCTASGCNSTMIEMGWFRQAPGKEREFVASISRARALTYYADSVKGRFTISRDDARNTVYLQMNSLKPEDTAVYYCNVTTVEVRDIVRFSEYWGQGTQVTVSS

SEQ ID NO: 9808 - protein, 117 aa, synthetic construct
EVQLVESGGGLVQAGDSLRLSCTASGNLKGVLEMGWFRQAPGKEREFVASISGRTLYTYYADSVKGRFTISRDDARNTVYLQMNSLKPEDTAVYYCNVVNLELVEYWGQGTQVTVSS

SEQ ID NO: 9809 - protein, 124 aa, synthetic construct
EVQLVESGGGLVQAGDSLRLSCTASGNVTRAIEMGWFRQAPGKEREFVASISDGLGYTYYADSVKGRFTISRDDARNTVYLQMNSLKPEDTAVYYCNVSSLSETHMHVKIIEYWGQGTQVTVSS

SEQ ID NO: 9810 - protein, 124 aa, synthetic construct
EVQLVESGGGLVQAGDSLRLSCTASGFINGVLEMGWFRQAPGKEREFVASISNVSVYTYYADSVKGRFTISRDDARNTVYLQMNSLKPEDTAVYYCNVTTFRPVCSVMSILEYWGQGTQVTVSS

SEQ ID NO: 9811 - protein, 120 aa, synthetic construct
EVQLVESGGGLVQAGDSLRLSCTASGTRAGIMEMGWFRQAPGKEREFVASISATTGGTYYADSVKGRFTISRDDARNTVYLQMNSLKPEDTAVYYCNVTRFIVKNFVEYWGQGTQVTVSS

SEQ ID NO: 9812 - protein, 124 aa, synthetic construct
EVQLVESGGGLVQAGDSLRLSCTASGMRIVFMRMGWFRQAPGKEREFVASISGFRTATYYADSVKGRFTISRDDARNTVYLQMNSLKPEDTAVYYCNVADELDMNSVPADTEYWGQGTQVTVSS

SEQ ID NO: 9813 - protein, 119 aa, synthetic construct
EVQLVESGGGLVQAGDSLRLSCTASGIMLVFNAMGWFRQAPGKEREFVASISGFGGRTYYADSVKGRFTISRDDARNTVYLQMNSLKPEDTAVYYCKMIKAGSMVMEYWGQGTQVTVSS

SEQ ID NO: 9814 - protein, 120 aa, synthetic construct
EVQLVESGGGLVQAGDSLRLSCTASGVSEMMLEMGWFRQAPGKEREFVASISWLRGGTYYADSVKGRFTISRDDARNTVYLQMNSLKPEDTAVYYCNVTSFGGTHFVEYWGQGTQVTVSS

SEQ ID NO: 9815 - protein, 120 aa, synthetic construct
EVQLVESGGGLVQAGDSLRLSCTASGRVSNGVEMGWFRQAPGKEREFVASISVRTGRTYYADSVKGRFTISRDDARNTVYLQMNSLKPEDTAVYYCNVTASRALGFQEYWGQGTQVTVSS

SEQ ID NO: 9816 - protein, 121 aa, synthetic construct
EVQLVESGGGLVQAGDSLRLSCTASGSSGRFIEMGWFRQAPGKEREFVASISGGRRYTYYADSVKGRFTISRDDARNTVYLQMNSLKPEDTAVYYCNVTTLSSHLMFVEYWGQGTQVTVSS

SEQ ID NO: 9817 - protein, 119 aa, synthetic construct
EVQLVESGGGLVQAGDSLRLSCTASGRIRGAIEMGWFRQAPGKEREFVASISYRQAMTYYADSVKGRFTISRDDARNTVYLQMNSLKPEDTAVYYCNVTAVCKRVQEYWGQGTQVTVSS

SEQ ID NO: 9818 - protein, 120 aa, synthetic construct
EVQLVESGGGLVQAGDSLRLSCTSSGIVSYILGMGWFRQAPGKEREFVASISVNNGDTYYADSVKGRFTISRDDARNTVYLQMNSLKPEDTAVYYCNVTVIETVMFREYWGQGTQVTVSS

SEQ ID NO: 9819 - protein, 120 aa, synthetic construct
EVQLVESGGGLVQAGDSLRLSCTASGERQAWLEMGWFRQAPGKEREFVASISGSGMYTYYADSVKGRFTISRDDARNTVYLQMNSLKPEDTAVYYCNVVLASGGTIREYWGQGTQVTVSS

SEQ ID NO: 9820 - protein, 124 aa, synthetic construct
EVQLVESGGGLVQAGDSLRLSCTASGRRLKIIEMGWFRQAPGKEREFVASISAQAVYTYYADSVKGRFTISRDDARNTVYLQMNSLKPEDTAVYYCNVLGLQGNGGMARFAEYWGQGTQVTVSS

SEQ ID NO: 9821 - protein, 119 aa, synthetic construct
EVQLVESGGGLVQAGDSLRLSCTASGRMMGMVEMGWFRQAPGKEREFVASISDRVGYTYYADSVKGRFTISRDDARNTVYLQMNSLKPEDTAVYYCNVTVMIRSFVEYWGQGTQVTVSS

SEQ ID NO: 9822 - protein, 120 aa, synthetic construct
EVQLVESGGGLVQAGDSLRLSCTASGNVGVEIEMGWFRQAPGKEREFVASISGIDRSTYYADSVKGRFTISRDDARNTVYLQMNSLKPEDTAVYYCNVTLFQVGKFIEYWGQGTQVTVSS

SEQ ID NO: 9823 - protein, 117 aa, synthetic construct
EVQLVESGGGLVQAGDSLRLSCTASGRTQDVLFMGWFRQAPGKEREFVASISKVVDNTYYADSVKGRFTISRDDARNTVYLQMNSLKPEDTAVYYCNVIGWFSGEYWGQGTQVTVSS

SEQ ID NO: 9824 - protein, 120 aa, synthetic construct
EVQLVESGGGLVQAGDSLRLSCTASGCIRNAVDMGWFRQAPGKEREFVASISREALYTYYADSVKGRFTISRDDARNTVYLQMNSLKPEDTAVYYCNVTMWIANRFVEYWGQGTQVTVSS

SEQ ID NO: 9825 - protein, 120 aa, synthetic construct
EVQLVESGGGLVQAGDSLRLSCTASGQCSGVVEMGWFRQAPGKEREFVASISARVWYTYYADSVKGRFTISRDDARNTVYLQMNSLKPEDTAVYYCNVTSLNGLAVLEYWGQGTQVTVSS

SEQ ID NO: 9826 - protein, 121 aa, synthetic construct
EVQLVESGGGLVQAGDSLRLSCTASGVTSLALEMGWFRQAPGKEREFVASISAAIGRTYYADSVKGRFTISRDDARNTVYLQMNSLKPEDTAVYYCNVTTYHRAQGFLEYWGQGTQVTVSS

SEQ ID NO: 9827 - protein, 120 aa, synthetic construct
EVQLVESGGGLVQAGDSLRLSCTASGMIGVFLEMGWFRQAPGKEREFVASISTRNDYTYYADSVKGRFTISRDDARNTVYLQMNSLKPEDTAVYYCNVLVVNSGGFLEYWGQGTQVTVSS

SEQ ID NO: 9828 - protein, 119 aa, synthetic construct
EVQLVESGGGLVQAGDSLRLSCTASGVVYPIVEMGWFRQAPGKEREFVASISGRSAGTYYADSVKGRFTISRDDARNTVYLQMNSLKPEDTAVYYCNVTVYTSVFYEYWGQGTQVTVSS

SEQ ID NO: 9829 - protein, 120 aa, synthetic construct
EVQLVESGGGLVQAGDSLRLSCTASGSKDGILEMGWFRQAPGKEREFVASISGSHTYTYYADSVKGRFTISRDDARNTVYLQMNSLKPEDTAVYYCNVVFVLRFGVVEYWGQGTQVTVSS

SEQ ID NO: 9830 - protein, 119 aa, synthetic construct
EVQLVESGGGLVQAGDSLRLSCTASGRVHDAIEMGWFRQAPGKEREFVASISGRRVLTYYADSVKGRFTISRDDARNTVYLQMNSLKPEDTAVYYCNVTCWVGQFVEYWGQGTQVTVSS

SEQ ID NO: 9831 - protein, 121 aa, synthetic construct
EVQLVESGGGLVQAGDSLRLSCTASGTTYKAIFMGWFRQAPGKEREFVASISGVYHMTYYADSVKGRFTISRDDARNTVYLQMNSLKPEDTAVYYCNVDPFVLISGKREYWGQGTQVTVSS

SEQ ID NO: 9832 - protein, 121 aa, synthetic construct
EVQLVESGGGLVQAGDSLRLSCTASGMFAQGLEMGWFRQAPGKEREFVASISLQNDYTYYADSVKGRFTISRDDARNTVYLQMNSLKPEDTAVYYCNVGVYIVRLGFAEYWGQGTQVTVSS

SEQ ID NO: 9833 - protein, 121 aa, synthetic construct
EVQLVESGGGLVQAGDSLRLSCTASGIWLIVVEMGWFRQAPGKEREFVASISGRGGQTYYADSVKGRFTISRDDARNTVYLQMNSLKPEDTAVYYCNVTVLAATVVFAEYWGQGTQVTVSS

SEQ ID NO: 9834 - protein, 120 aa, synthetic construct
EVQLVESGGGLVQAGDSLRLSCTASGMCRVTIEMGWFRQAPGKEREFVASISGQTVNTYYADSVKGRFTISRDDARNTVYLQMNSLKPEDTAVYYCNVVRFSGFMFEEYWGQGTQVTVSS

SEQ ID NO: 9835 - protein, 117 aa, synthetic construct
EVQLVESGGGLVQAGDSLRLSCTASGEQSLIMEMGWFRQAPGKEREFVASISGRGRLTYYADSVKGRFTISRDDARNTVYLQMNSLKPEDTAVYYCNVTQISFKEYWGQGTQVTVSS

SEQ ID NO: 9836 - protein, 119 aa, synthetic construct
EVQLVESGGGLVQAGDSLRLSCTASGRILDVIEMGWFRQAPGKEREFVASISVRRQWTYYADSVKGRFTISRDDARNTVYLQMNSLKPEDTAVYYCNVTRLETRFMEYWGQGTQVTVSS

SEQ ID NO: 9837 - protein, 122 aa, synthetic construct
EVQLVESGGGLVQAGDSLRLSCTASGQLSRMVEMGWFRQAPGKEREFVASISGRTMETYYADSVKGRFTISRDDARNTVYLQMNSLKPEDTAVYYCNVTVLRLADWKFMEYWGQGTQVTVSS

SEQ ID NO: 9838 - protein, 120 aa, synthetic construct
EVQLVESGGGLVQAGDSLRLSCTASGGGAGILEMGWFRQAPGKEREFVASISGQNLFTYYADSVKGRFTISRDDARNTVYLQMNSLKPEDTAVYYCNVTVVRRGLFSEYWGQGTQVTVSS

SEQ ID NO: 9839 - protein, 121 aa, synthetic construct
EVQLVESGGGLVQAGDSLRLSCTASGLFGLLMEMGWFRQAPGKEREFVASISARNRYTYYADSVKGRFTISRDDARNTVYLQMNSLKPEDTAVYYCNVTMLEAGGRPSEYWGQGTQVTVSS

SEQ ID NO: 9840 - protein, 121 aa, synthetic construct
EVQLVESGGGLVQAGDSLRLSCTASGSRIVFQSMGWFRQAPGKEREFVASISGFNGLTYYADSVKGRFTISRDDARNTVYLQMNSLKPEDTAVYYCNVNADVSVVTCGEYWGQGTQVTVSS

SEQ ID NO: 9841 - protein, 121 aa, synthetic construct
EVQLVESGGGLVQAGDSLRLSCTASGITAIVLEMGWFRQAPGKEREFVASISGTSKFTYYADSVKGRFTISRDDARNTVYLQMNSLKPEDTAVYYCNVTMYLKFGAFREYWGQGTQVTVSS

SEQ ID NO: 9842 - protein, 119 aa, synthetic construct
EVQLVESGGGLVQAGDSLRLSCTASGPGWGIMEMGWFRQAPGKEREFVASISVRYNGTYYADSVKGRFTISRDDARNTVYLQMNSLKPEDTAVYYCNVTIWRGQFMEYWGQGTQVTVSS

SEQ ID NO: 9843 - protein, 117 aa, synthetic construct
EVQLVESGGGLVQAGDSLRLSCTASGGAKELMEMGWFRQAPGKEREFVASISVRNNWTYYADSVKGRFTISRDDARNTVYLQMNSLKPEDTAVYYCNVTMSSFKEYWGQGTQVTVSS

SEQ ID NO: 9844 - protein, 123 aa, synthetic construct
EVQLVESGGGLVQAGDSLRLSCTASGFRIVFTDMGWFRQAPGKEREFVASISGLGWLTYYADSVKGRFTISRDDARNTVYLQMNSLKPEDTAVYYCNVVVHDVGYLDDIPEYWGQGTQVTVSS

SEQ ID NO: 9845 - protein, 120 aa, synthetic construct
EVQLVESGGGLVQAGDSLRLSCTASGSGFGLIEMGWFRQAPGKEREFVASISVANAYTYYADSVKGRFTISRDDARNTVYLQMNSLKPEDTAVYYCNVTARLRLVFREYWGQGTQVTVSS

SEQ ID NO: 9846 - protein, 123 aa, synthetic construct
EVQLVESGGGLVQAGDSLRLSCTASGRLGVVLEMGWFRQAPGKEREFVASISAQRAYTYYADSVKGRFTISRDDARNTVYLQMNSLKPEDTAVYYCNVTNIKECSGVRFNEYWGQGTQVTVSS

SEQ ID NO: 9847 - protein, 119 aa, synthetic construct
EVQLVESGGGLVQAGDSLRLSCTASGLGRFGIEMGWFRQAPGKEREFVASISIRRAGTYYADSVKGRFTISRDDARNTVYLQMNSLKPEDTAVYYCNVTCWDGHFAEYWGQGTQVTVSS

SEQ ID NO: 9848 - protein, 120 aa, synthetic construct
EVQLVESGGGLVQAGDSLRLSCTASGVMDGAIEMGWFRQAPGKEREFVASISARVASTYYADSVKGRFTISRDDARNTVYLQMNSLKPEDTAVYYCNVTLVARLAFVEYWGQGTQVTVSS

SEQ ID NO: 9849 - protein, 121 aa, synthetic construct
EVQLVESGGGLVQAGDSLRLSCTASGQIRGALEMGWFRQAPGKEREFVASISNRRVYTYYADSVKGRFTISRDDARNTVYLQMNSLKPEDTAVYYCNVTAVTGLSWFQEYWGQGTQVTVSS

SEQ ID NO: 9850 - protein, 121 aa, synthetic construct
EVQLVESGGGLVQAGDSLRLSCTASGIRHRCIEMGWFRQAPGKEREFVASISAHRDYTYYADSVKGRFTISRDDARNTVYLQMNSLKPEDTAVYYCNVISLAVRAGFVEYWGQGTQVTVSS

SEQ ID NO: 9851 - protein, 124 aa, synthetic construct
EVQLVESGGGLVQAGDSLRLSCTASGLIDGGVEMGWFRQAPGKEREFVASISSGRSYTYYADSVKGRFTISRDDARNTVYLQMNSLKPEDTAVYYCNVTCIHWVMASVRIGEYWGQGTQVTVSS

SEQ ID NO: 9852 - protein, 121 aa, synthetic construct
EVQLVESGGGLVQAGDSLRLSCTASGTSVQMIEMGWFRQAPGKEREFVASISNRDGYTYYADSVKGRFTISRDDARNTVYLQMNSLKPEDTAVYYCNVSTWSDGGGFGEYWGQGTQVTVSS

SEQ ID NO: 9853 - protein, 120 aa, synthetic construct
EVQLVESGGGLVQAGDSLRLSCTASGKQGLMLEMGWFRQAPGKEREFVASISIVRDYTYYADSVKGRFTISRDDARNTVYLQMNSLKPEDTAVYYCNVSVRTSHGFSEYWGQGTQVTVSS

SEQ ID NO: 9854 - protein, 120 aa, synthetic construct
EVQLVESGGGLVQAGDSLRLSCTASGEPVGVVEMGWFRQAPGKEREFVASISGRDSYTYYADSVKGRFTISRDDARNTVYLQMNSLKPEDTAVYYCNVTSLVQAGVKEYWGQGTQVTVSS

SEQ ID NO: 9855 - protein, 120 aa, synthetic construct
EVQLVESGGGLVQAGDSLRLSCTASGMVRGGLEMGWFRQAPGKEREFVASISMYGHYTYYADSVKGRFTISRDDARNTVYLQMNSLKPEDTAVYYCNVTVVVRVSVREYWGQGTQVTVSS

SEQ ID NO: 9856 - protein, 121 aa, synthetic construct
EVQLVESGGGLVQAGDSLRLSCTASGGRPLLVEMGWFRQAPGKEREFVASISGQRVGTYYADSVKGRFTISRDDARNTVYLQMNSLKPEDTAVYYCNVTVFLPHIGFGEYWGQGTQVTVSS

SEQ ID NO: 9857 - protein, 120 aa, synthetic construct
EVQLVESGGGLVQAGDSLRLSCTASGSMGNVLEMGWFRQAPGKEREFVASISGRSTATYYADSVKGRFTISRDDARNTVYLQMNSLKPEDTAVYYCNVTAWIVESFTEYWGQGTQVTVSS

SEQ ID NO: 9858 - protein, 119 aa, synthetic construct
EVQLVESGGGLVQAGDSLRLSCTASGSAPGTLEMGWFRQAPGKEREFVASISGDAGLTYYADSVKGRFTISRDDARNTVYLQMNSLKPEDTAVYYCRHTIVFNGLVEYWGQGTQVTVSS

SEQ ID NO: 9859 - protein, 125 aa, synthetic construct
EVQLVESGGGLVQAGDSLRLSCTASGNLGGLMEMGWFRQAPGKEREFVASISSIGWYTYYADSVKGRFTISRDDARNTVYLQMNSLKPEDTAVYYCNVFCVVKDSNRMATFIEYWGQGTQVTVSS

SEQ ID NO: 9860 - protein, 121 aa, synthetic construct
EVQLVESGGGLVQAGDSLRLSCTASGIVQGFVEMGWFRQAPGKEREFVASISGGVRATYYADSVKGRFTISRDDARNTVYLQMNSLKPEDTAVYYCNVTCFMRGRGFVEYWGQGTQVTVSS

SEQ ID NO: 9861 - protein, 120 aa, synthetic construct
EVQLVESGGGLVQAGDSLRLSCTASGQARGAIEMGWFRQAPGKEREFVASISWRGNSTYYADSVKGRFTISRDDARNTVYLQMNSLKPEDTAVYYCNVTVFDRYGSGEYWGQGTQVTVSS

SEQ ID NO: 9862 - protein, 124 aa, synthetic construct
EVQLVESGGGLVQAGDSLRLSCTASGKAREKIEMGWFRQAPGKEREFVASISLHVDYTYYADSVKGRFTISRDDARNTVYLQMNSLKPEDTAVYYCNVTAVNIRLGRVKINEYWGQGTQVTVSS

SEQ ID NO: 9863 - protein, 120 aa, synthetic construct
EVQLVESGGGLVQAGDSLRLSCTASGNRRGSVEMGWFRQAPGKEREFVASISRDMDYTYYADSVKGRFTISRDDARNTVYLQMNSLKPEDTAVYYCNVWVVRENGFSEYWGQGTQVTVSS

SEQ ID NO: 9864 - protein, 122 aa, synthetic construct
EVQLVESGGGLVQAGDSLRLSCTASGARGVIIEMGWFRQAPGKEREFVASISGTGMHTYYADSVKGRFTISRDDARNTVYLQMNSLKPEDTAVYYCNVTMFVVRRGEFVEYWGQGTQVTVSS

SEQ ID NO: 9865 - protein, 121 aa, synthetic construct
EVQLVESGGGLVQAGDSLRLSCTASGIKSSVLEMGWFRQAPGKEREFVASISGRDATTYYADSVKGRFTISRDDARNTVYLQMNSLKPEDTAVYYCNVTVVISNGRLVEYWGQGTQVTVSS

SEQ ID NO: 9866 - protein, 120 aa, synthetic construct
EVQLVESGGGLVQAGDSLRLSCTASGWRIVFRSMGWFRQAPGKEREFVASISGFCERTYYADSVKGRFTISRDDARNTVYLQMNSLKPEDTAVYYCNVPLMDNDNTAEYWGQGTQVTVSS

SEQ ID NO: 9867 - protein, 123 aa, synthetic construct
EVQLVESGGGLVQAGDSLRLSCTASGDTRRLLEMGWFRQAPGKEREFVASISENQDYTYYADSVKGRFTISRDDARNTVYLQMNSLKPEDTAVYYCNVTVLLLLRAIAFGEYWGQGTQVTVSS

SEQ ID NO: 9868 - protein, 120 aa, synthetic construct
EVQLVESGGGLVQAGDSLRLSCTASGIWVTVLEMGWFRQAPGKEREFVASISVHNGSTYYADSVKGRFTISRDDARNTVYLQMNSLKPEDTAVYYCNVTAIGRIRFIEYWGQGIQVTVSS

SEQ ID NO: 9869 - protein, 120 aa, synthetic construct
EVQLVESGGGLVQAGDSLRLSCTASGHNTTVLEMGWFRQAPGKEREFVASISGYGQYTYYADSVKGRFTISRDDARNTVYLQMNSLKPEDTAVYYCNVTWATQRGFIEYWGQGTQVTVSS

SEQ ID NO: 9870 - protein, 120 aa, synthetic construct
EVQLVESGGGLVQAGDSLRLSCTASGNGKEVLEMGWFRQAPGKEREFVASISMRQIYTYYADSVKGRFTISRDDARNTVYLQMNSLKPEDTAVYYCNVSQLIMTGFCEYWGQGTQVTVSS

SEQ ID NO: 9871 - protein, 120 aa, synthetic construct
EVQLVESGGGLVQAGDSLRLSCTASGFEKAGVEMGWFRQAPGKEREFVASISVRDANTYYADSVKGRFTISRDDARNTVYLQMNSLKPEDTAVYYCNVTVCSTRRFVEYWGQGTQVTVSS

SEQ ID NO: 9872 - protein, 119 aa, synthetic construct
EVQLVESGGGLVQAGDSLRLSCTASGIVGKVIEMGWFRQAPGKEREFVASISGANLGTYYADSVKGRFTISRDDARNTVYLQMNSLKPEDTAVYYCNVTGFLAMFLEYWGQGTQVTVSS

SEQ ID NO: 9873 - protein, 121 aa, synthetic construct
EVQLVESGGGLVQAGDSLRLSCTASGIRGSLIEMGWFRQAPGKEREFVASISRTAVYTYYADSVKGRFTISRDDARNTVYLQMNSLKPEDTAVYYCNVVAFRMVDAFQEYWGQGTQVTVSS

SEQ ID NO: 9874 - protein, 119 aa, synthetic construct
EVQLVESGGGLVQAGDSLRLSCTASGRISGIIEMGWFRQAPGKEREFVASISDDGWYTYYADSVKGRFTISRDDARNTVYLQMNSLKPEDTAVYYCNVTRMTVRRVEYWGQGTQVTVSS

SEQ ID NO: 9875 - protein, 120 aa, synthetic construct
EVQLVESGGGLVQAGDSLRLSCTASGIVRDLMEMGWFRQAPGKEREFVASISGQIAYTYYADSVKGRFTISRDDARNTVYLQMNSLKPEDTAVYYCNVMMFSGTRFLEYWGQGTQVTVSS

SEQ ID NO: 9876 - protein, 116 aa, synthetic construct
EVQLVESGGGLVQAGDSLRLSCTASGYLEMGWFRQAPGKEREFVASISMNGPYTYYADSVKGRFTISRDDARNTVYLQMNSLKPEDTAVYYCNVVLVQMCVFHEYWGQGTQVTVSS

SEQ ID NO: 9877 - protein, 120 aa, synthetic construct
EVQLVESGGGLVQAGDSLRLSCTASGVPQTVLEMGWFRQAPGKEREFVASISRLLSYTYYADSVKGRFTISRDDARNTVYLQMNSLKPEDTAVYYCNVTTFRDHALSEYWGQGTQVTVSS

SEQ ID NO: 9878 - protein, 120 aa, synthetic construct
EVQLVESGGGLVQAGDSLRLSCTASGNLYYMLEMGWFRQAPGKEREFVASISSMAKYTYYADSVKGRFTISRDDARNTVYLQMNSLKPEDTAVYYCNVTIFSGRVLMEYWGQGTQVTVSS

SEQ ID NO: 9879 - protein, 120 aa, synthetic construct
EVQLVESGGGLVQAGDSLRLSCTASGLGGIVIEMGWFRQAPGKEREFVASISGRGGSTYYADSVKGRFTISRDDARNTVYLQMNSLKPEDTAVYYCNVTAIDNARIVEYWGQGTQVTVSS

SEQ ID NO: 9880 - protein, 120 aa, synthetic construct
EVQLVESGGGLVQAGDSLRLSCTASGNVRTLMEMGWFRQAPGKEREFVASISSDGPYTYYADSVKGRFTISRDDARNTVYLQMNSLKPEDTAVYYCNVTSVSRDGFKEYWGQGTQVTVSS

SEQ ID NO: 9881 - protein, 120 aa, synthetic construct
EVQLVESGGGLVQAGDSLRLSCTASGVTVMFIEMGWFRQAPGKEREFVASISVSYGDTYYADSVKGRFTISRDDARNTVYLQMNSLKPEDTAVYYCNVTTFTGAGFREYWGQGTQVTVSS

SEQ ID NO: 9882 - protein, 125 aa, synthetic construct
EVQLVESGGGLVQAGDSLRLSCTASGAGRFIMEMGWFRQAPGKEREFVASISRRDAYTYYADSVKGRFTISRDDARNTVYLQMNSLKPEDTAVYYCNVSSLHLADLGKIEKAEYWGQGTQVTVSS

SEQ ID NO: 9883 - protein, 120 aa, synthetic construct
EVQLVESGGGLVQAGDSLRLSCTASGTADRYIEMGWFRQAPGKEREFVASISGGVFYTYYADSVKGRFTISRDDARNTVYLQMNSLKPEDTAVYYCNVTFLAVMTIDEYWGQGTQVTVSS

SEQ ID NO: 9884 - protein, 119 aa, synthetic construct
EVQLVESGGGLVQAGDSLRLSCTASGDPGTMLEMGWFRQAPGKEREFVASISTRHHDTYYADSVKGRFTISRDDARNTVYLQMNSLKPEDTAVYYCRCDGWRMVKREYWGQGTQVTVSS

SEQ ID NO: 9885 - protein, 120 aa, synthetic construct
EVQLVESGGGLVQAGDSLRLSCTASGGQERVIDMGWFRQAPGKEREFVASISVRHDDTYYADSVKGRFTISRDDARNTVYLQMNSLKPEDTAVYYCNVTVVGRLGFYEYWGQGTQVTVSS

SEQ ID NO: 9886 - protein, 120 aa, synthetic construct
EVQLVESGGGLVQAGDSLRLSCTASGGYERVVEMGWFRQAPGKEREFVASISGRDSLTYYADSVKGRFTISRDDARNTVYLQMNSLKPEDTAVYYCNVTLLNIQRFVEYWGQGTQVTVSS

SEQ ID NO: 9887 - protein, 117 aa, synthetic construct
EVQLVESGGGLVQAGDSLRLSCTASGLGCDVMEMGWFRQAPGKEREFVASISGMDMYTYYADSVKGRFTISRDDARNTVYLQMNSLKPEDTAVYYCNVTLKAFEEYWGQGTQVTVSS

SEQ ID NO: 9888 - protein, 121 aa, synthetic construct
EVQLVESGGGLVQAGDSLRLSCTASGVTMVMLEMGWFRQAPGKEREFVASISGSRTYTYYADSVKGRFTISRDDARNTVYLQMNSLKPEDTAVYYCNVSAILNGGGIVEYWGQGTQVTVSS

SEQ ID NO: 9889 - protein, 120 aa, synthetic construct
EVQLVESGGGLVQAGDSLRLSCTASGQSVFFIEMGWFRQAPGKEREFVASISVADAYTYYADSVKGRFTISRDDARNTVYLQMNSLKPEDTAVYYCNVTGLFRRKFLEYWGQGTQVTVSS

SEQ ID NO: 9890 - protein, 122 aa, synthetic construct
EVQLVESGGGLVQAGDSLRLSCTASGLGDFSVEMGWFRQAPGKEREFVASISSVNIYTYYADSVKGRFTISRDDARNTVYLQMNSLKPEDTAVYYCNVTGWDSTVGRFAEYWGQGTQVTVSS

SEQ ID NO: 9891 - protein, 122 aa, synthetic construct
EVQLVESGGGLVQAGDSLRLSCTASGTCADVVEMGWFRQAPGKEREFVASISNVTVYTYYADSVKGRFTISRDDARNTVYLQMNSLKPEDTAVYYCNVTAIDRLMIKFTEYWGQGTQVTVSS

SEQ ID NO: 9892 - protein, 120 aa, synthetic construct
EVQLVESGGGLVQAGDSLRLSCTASGLGRHVMEMGWFRQAPGKEREFVASISGGFMYTYYADSVKGRFTISRDDARNTVYLQMNSLKPEDTAVYYCNVTMALTARFKEYWGQGTQVTVSS

SEQ ID NO: 9893 - protein, 115 aa, synthetic construct
EVQLVESGGGLVQAGDSLRLSCTASGLVMDWFRQAPGKEREFVASISGTGPYTYYADSVKGRFTISRDDARNTVYLQMNSLKPEDTAVYYCNVVIVGRDRFQEYWGQGTQVTVSS

SEQ ID NO: 9894 - protein, 124 aa, synthetic construct
EVQLVESGGGLVQAGDSLRLSCTASGVHGDGLCMGWFRQAPGKEREFVASISAVRLWTYYADSVKGRFTISRDDARNTVYLQMNSLKPEDTAVYYCNVKGIIPDVRTMAWVEYWGQGTQVTVSS

SEQ ID NO: 9895 - protein, 120 aa, synthetic construct
EVQLVESGGGLVQAGDSLRLSCTASGRSNLVLEMGWFRQAPGKEREFVASISFNSTYTYYADSVKGRFTISRDDARNTVYLQMNSLKPEDTAVYYCNVVIFTVGAFREYWGQGTQVTVSS

SEQ ID NO: 9896 - protein, 121 aa, synthetic construct
EVQLVESGGGLVQAGDSLRLSCTASGMAYNVIEMGWFRQAPGKEREFVASISGGRVYTYYADSVKGRFTISRDDARNTVYLQMNSLKPEDTAVYYCNVVLCDALGSFWEYWGQGTQVTVSS

SEQ ID NO: 9897 - protein, 123 aa, synthetic construct
EVQLVESGGGLVQAGDSLRLSCTASGSSWRLIEMGWFRQAPGKEREFVASISGRDMSTYYADSVKGRFTISRDDARNTVYLQMNSLKPEDTAVYYCNVTALIRKPYMRFMEYWGQGTQVTVSS

SEQ ID NO: 9898 - protein, 120 aa, synthetic construct
EVQLVESGGGLVQAGDSLRLSCTASGHVCVVVEMGWFRQAPGKEREFVASISGAGKWTYYADSVKGRFTISRDDARNTVYLQMNSLKPEDTAVYYCNVTSFSNACFVEYWGQGTQVTVSS

SEQ ID NO: 9899 - protein, 120 aa, synthetic construct
EVQLVESGGGLVQAGDSLRLSCTASGHHNVLLEMGWFRQAPGKEREFVASISWVRAYTYYADSVKGRFTISRDDARNTVYLQMNSLKPEDTAVYYCNVTYVADGLFGEYWGQGTQVTVSS

SEQ ID NO: 9900 - protein, 122 aa, synthetic construct
EVQLVESGGGLVQAGDSLRLSCTASGEGRVTIEMGWFRQAPGKEREFVASISGMHEYTYYADSVKGRFTISRDDARNTVYLQMNSLKPEDTAVYYCNVVQMIRWDGGWQEYWGQGTQVTVSS

SEQ ID NO: 9901 - protein, 120 aa, synthetic construct
EVQLVESGGGLVQAGDSLRLSCTASGSICEVVEMGWFRQAPGKEREFVASISRHTAYTYYADSVKGRFTISRDDARNTVYLQMNSLKPEDTAVYYCNVTAVVNMMIVEYWGQGTQVTVSS

SEQ ID NO: 9902 - protein, 125 aa, synthetic construct
EVQLVESGGGLVQAGDSLRLSCTASGRREVLIEMGWFRQAPGKEREFVASISGRGTGTYYADSVKGRFTISRDDARNTVYLQMNSLKPEDTAVYYCNVTYIGRDVSMCVKFWEYWGQGTQVTVSS

SEQ ID NO: 9903 - protein, 119 aa, synthetic construct
EVQLVESGGGLVQAGDSLRLSCTASGIIGGLMAMDWFRQAPGKEREFVASISGHGVRTYYADSVKGRFTISRDDARNTVYLQMNSLKPEDTAVYYCNVLVFREDFLEYWGQGTQVTVSS

SEQ ID NO: 9904 - protein, 120 aa, synthetic construct
EVQLVESGGGLVQAGDSLRLSCTASGSGDSMIEMGWFRQAPGKEREFVASISRNVNYTYYADSVKGRFTISRDDARNTVYLQMNSLKPEDTAVYYCNVTELRTLKVQEYWGQGTQVTVSS

SEQ ID NO: 9905 - protein, 120 aa, synthetic construct
EVQLVESGGGLVQAGDSLRLSCTASGTMGLMVDMGWFRQAPGKEREFVASISWREHYTYYADSVKGRFTISRDDARNTVYLQMNSLKPEDTAVYYCNVTTLLNMRFVEYWGQGTQVTVSS

SEQ ID NO: 9906 - protein, 119 aa, synthetic construct
EVQLVESGGGLVQAGDSLRLSCTASGGMIGVIEMGWFRQAPGKEREFVASISGAGNATYYADSVKGRFTISRDDARNTVYLQMNSLKPEDTAVYYCNVTMLRSLFTEYWGQGTQVTVSS

SEQ ID NO: 9907 - protein, 123 aa, synthetic construct
EVQLVESGGGLVQAGDSLRLSCTASGQSGYAIEMGWFRQAPGKEREFVASISMRIAYTYYADSVKGRFTISRDDARNTVYLQMNSLKPEDTAVYYCNVTAVLTGDRSGISEYWGQGTQVTVSS

SEQ ID NO: 9908 - protein, 121 aa, synthetic construct
EVQLVESGGGLVQAGDSLRLSCTASGQGVWILEMGWFRQAPGKEREFVASISGHDLYTYYADSVKGRFTISRDDARNTVYLQMNSLKPEDTAVYYCNVTVCFPGSCFNEYWGQGTQVTVSS

SEQ ID NO: 9909 - protein, 119 aa, synthetic construct
EVQLVESGGGLVQAGDSLRLSCTASGYCGTIIEMGWFRQAPGKEREFVASISGMAWETYYADSVKGRFTISRDDARNTVYLQMNSLKPEDTAVYYCNVTVFDASFYEYWGQGTQVTVSS

SEQ ID NO: 9910 - protein, 119 aa, synthetic construct
EVQLVESGGGLVQAGDSLRLSCTASGVCGVCLEMGWFRQAPGKEREFVASISVRDDDTYYADSVKGRFTISRDDARNTVYLQMNSLKPEDTAVYYCNVVSFDRNFEEYWGQGTQVTVSS

SEQ ID NO: 9911 - protein, 120 aa, synthetic construct
EVQLVESGGGLVQAGDSLRLSCTASGPLSSMLEMGWFRQAPGKEREFVASISCKHRVTYYADSVKGRFTISRDDARNTVYLQMNSLKPEDTAVYYCNVTSMGGHRFVEYWGQGTQVTVSS

SEQ ID NO: 9912 - protein, 119 aa, synthetic construct
EVQLVESGGGLVQAGDSLRLSCTASGVSSDVMEMGWFRQAPGKEREFVASISGRSGWTYYADSVKGRFTISRDDARNTVYLQMNSLKPEDTAVYYCNVVTFAYAFYEYWGQGTQVTVSS

SEQ ID NO: 9913 - protein, 120 aa, synthetic construct
EVQLVESGGGLVQAGDSLRLSCTASGKRIVFQEMGWFRQAPGKEREFVASISGFRIITYYADSVKGRFTISRDDARNTVYLQMNSLKPEDTAVYYCNVCMGCAWTTDEYWGQGTQVTVSS

SEQ ID NO: 9914 - protein, 119 aa, synthetic construct
EVQLVESGGGLVQAGDSLRLSCTASGSLRDVIEMGWFRQAPGKEREFVASISSSDTYTYYADSVKGRFTISRDDARNTVYLQMNSLKPEDTAVYYCNVGVFARHKQEYWGQGTQVTVSS

SEQ ID NO: 9915 - protein, 120 aa, synthetic construct
EVQLVESGGGLVQAGDSLRLSCTASGESGGKIEMGWFRQAPGKEREFVASISWHTSGTYYADSVKGRFTISRDDARNTVYLQMNSLKPEDTAVYYCNVTCINDGGFVEYWGQGTQVTVSS

SEQ ID NO: 9916 - protein, 119 aa, synthetic construct
EVQLVESGGGLVQAGDSLRLSCTASGNVDDIIEMGWFRQAPGKEREFVASISRRTVYTYYADSVKGRFTISRDDARNTVYLQMNSLKPEDTAVYYCNVVNLRLRVTEYWGQGTQVTVSS

SEQ ID NO: 9917 - protein, 120 aa, synthetic construct
EVQLVESGGGLVQAGDSLRLSCTASGLTERTLEMGWFRQAPGKEREFVASISVTHTGTYYADSVKGRFTISRDDARNTVYLQMNSLKPEDTAVYYCNVLVVTRHSFTEYWGQGTQVTVSS

SEQ ID NO: 9918 - protein, 119 aa, synthetic construct
EVQLVESGGGLVQAGDSLRLSCTASGHMVNVVEMGWFRQAPGKEREFVASISGDAIYTYYADSVKGRFTISRDDARNTVYLQMNSLKPEDTAVYYCNVVIVADGFVEYWGQGTQVTVSS

SEQ ID NO: 9919 - protein, 125 aa, synthetic construct
EVQLVESGGGLVQAGDSLRLSCTASGHEGRVLEMGWFRQAPGKEREFVASISGFHGCTYYADSVKGRFTISRDDARNTVYLQMNSLKPEDTAVYYCNVMSESRDPSVLECVGEYWGQGTQVTVSS

SEQ ID NO: 9920 - protein, 119 aa, synthetic construct
EVQLVESGGGLVQAGDSLRLSCTASGSSGAVVEMGWFRQAPGKEREFVASISGMSNYTYYADSVKGRFTISRDDARNTVYLQMNSLKPEDTAVYYCNVVMWGIALSEYWGQGTQVTVSS

SEQ ID NO: 9921 - protein, 120 aa, synthetic construct
EVQLVESGGGLVQAGDSLRLSCTASGNHAMLIEMGWFRQAPGKEREFVASISGKGRYTYYADSVKGRFTISRDDARNTVYLQMNSLKPEDTAVYYCNVTMFHNSHFLEYWGQGTQVTVSS

SEQ ID NO: 9922 - protein, 121 aa, synthetic construct
EVQLVESGGGLVQAGDSLRLSCTASGLERSGLEMGWFRQAPGKEREFVASISVKNYNTYYADSVKGRFTISRDDARNTVYLQMNSLKPEDTAVYYCNVTALTPGFRFLEYWGQGTQVTVSS

SEQ ID NO: 9923 - protein, 117 aa, synthetic construct
EVQLVESGGGLVQAGDSLRLSCTASGIYQGVMEMGWFRQAPGKEREFVASISGRVVYTYYADSVKGRFTISRDDARNTVYLQMNSLKPEDTAVYYCNVTDRLFKEYWGQGTQVTVSS

SEQ ID NO: 9924 - protein, 121 aa, synthetic construct
EVQLVESGGGLVQAGDSLRLSCTASGISGILVEMGWFRQAPGKEREFVASISMSSSYTYYADSVKGRFTISRDDARNTVYLQMNSLKPEDTAVYYCNVATLKVDRGFSEYWGQGTQVTVSS

SEQ ID NO: 9925 - protein, 119 aa, synthetic construct
EVQLVESGGGLVQAGDSLRLSCTASGVEPSAGIMGWFRQAPGKEREFVASISDWLEGTYYADSVKGRFTISRDDARNTVYLQMNSLKPEDTAVYYCNVRLFRYRFEEYWGQGTQVTVSS

SEQ ID NO: 9926 - protein, 119 aa, synthetic construct
EVQLVESGGGLVQAGDSLRLSCTASGDVTGFIEMGWFRQAPGKEREFVASISVGGPYTYYADSVKGRFTISRDDARNTVYLQMNSLKPEDTAVYYCNVTEWTGGFAEYWGQGTQVTVSS

SEQ ID NO: 9927 - protein, 121 aa, synthetic construct
EVQLVESGGGLVQAGDSLRLSCTASGAEGIDLEMGWFRQAPGKEREFVASISGNDRLTYYADSVKGRFTISRDDARNTVYLQMNSLKPEDTAVYYCNVTKWHSLRGFWEYWGQGTQVTVSS

SEQ ID NO: 9928 - protein, 120 aa, synthetic construct
EVQLVESGGGLVQAGDSLRLSCTASGATGVNVEMGWFRQAPGKEREFVASISVQACYTYYADSVKGRFTISRDDARNTVYLQMNSLKPEDTAVYYCNVTYVSSGRFVEYWGQGTQVNVSS

SEQ ID NO: 9929 - protein, 118 aa, synthetic construct
EVQLVESGGGLVQAGDSLRLSCTASGNIGAGALMGWFRQAPGKEREFVASISGLVLYTYYADSVKGRFTISRDDARNTVYLQMNSLKPEDTAVYYCNVLDLLVWEEYWGQGTQVTVSS

SEQ ID NO: 9930 - protein, 121 aa, synthetic construct
EVQLVESGGGLVQAGDSLRLSCTASGMMPNALEMGWFRQAPGKEREFVASISVVAMDTYYADSVKGRFTISRDDARNTVYLQMNSLKPEDTAVYYCNVTSMEMGYRKREYWGQGTQVTVSS

SEQ ID NO: 9931 - protein, 117 aa, synthetic construct
EVQLVESGGGLVQAGDSLRLSCTASGQVPDVLEMGWFRQAPGKEREFVASISGAGMYTYYADSVKGRFTISRDDARNTVYLQMNSLKPEDTAVYYCNVVTRAFTEYWGQGTQVTVSS

SEQ ID NO: 9932 - protein, 119 aa, synthetic construct
EVQLVESGGGLVQAGDSLRLSCTASGLRPAVMEMGWFRQAPGKERAFVASISGHAHDTYYADSVKGRFTISRDDARNTVYLQMNSLKPEDTAVYYCNVTVFVRRFVEYWGQGTQVTVSS

SEQ ID NO: 9933 - protein, 120 aa, synthetic construct
EVQLVESGGGLVQAGDSLRLSCTASGPMPMALEMGWFRQAPGKEREFVASISVRANWTYYADSVKGRFTISRDDARNTVYLQMNSLKPEDTAVYYCNVSSVSRSGLTEYWGQGTQVTVSS

SEQ ID NO: 9934 - protein, 119 aa, synthetic construct
EVQLVESGGGLVQAGDSLRLSCTASGDPEFNVEMGWFRQAPGKEREFVASISGICGYTYYADSVKGRFTISRDDARNTVYLQMNSLKPEDTAVYYCNVVVFNAIFHEYWGQGTQVTVSS

SEQ ID NO: 9935 - protein, 119 aa, synthetic construct
EVQLVESGGGLVQAGDSLRLSCTASGDPGTIVEMGWFRQAPGKEREFVASISGTVHYTYYADSVKGRFTISRDDARNTVYLQMNSLKPEDTAVYYCNVTGVFKMFREYWGQGTQVTVSS

SEQ ID NO: 9936 - protein, 122 aa, synthetic construct
EVQLVESGGGLVQAGDSLRLSCTASGVRIVFRDMGWFRQAPGKEREFVASISGFELITYYADSVKGRFTISRDDARNTVYLQMNSLKPEDTAVYYCNVLDNSIAVIGVDEYWGQGTQVTVSS

SEQ ID NO: 9937 - protein, 122 aa, synthetic construct
EVQLVESGGGLVQAGDSLRLSCTASGTVYDVIEMGWFRQAPGKEREFVASISGRGQRTYYADSVKGRFTISRDDARNTVYLQMNSLKPEDTAVYYCNVTVIGGRSFLFVEYWGQGTQVTVSS

SEQ ID NO: 9938 - protein, 124 aa, synthetic construct
EVQLVESGGGLVQAGDSLRLSCTASGAYARVLEMGWFRQAPGKEREFVASISNSDLYTYYADSVKGRFTISRDDARNTVYLQMNSLKPEDTAVYYCNVVFLVMDSRNSGFIEYWGQGTQVTVSS

SEQ ID NO: 9939 - protein, 120 aa, synthetic construct
EVQLVESGGGLVQAGDSLRLSCTASGFKHAFIEMGWFRQAPGKEREFVASISGNGHYTYYADSVKGRFTISRDDARNTVYLQMNSLKPEDTAVYYCNVLLLLGMSVKEYWGQGTQVTVSS

SEQ ID NO: 9940 - protein, 120 aa, synthetic construct
EVQLVESGGGLVQAGDSLRLSCTASGRGNMMVEMGWFRQAPGKEREFVASISGRRCYTYYADSVKGRFTISRDDARNTVYLQMNSLKPEDTAVYYCNVTTWAQSRFLEYWGQGTQVTVSS

SEQ ID NO: 9941 - protein, 121 aa, synthetic construct
EVQLVESGGGLVQAGDSLRLSCTASGEFFCPLEMGWFRQAPGKEREFVASISVGQLYTYYADSVKGRFTISRDDARNTVYLQMNSLKPEDTAVYYCNVACITVHKMFTEYWGQGTQVTVSS

SEQ ID NO: 9942 - protein, 121 aa, synthetic construct
EVQLVESGGGLVQAGDSLRLSCTASGSTANFVEMGWFRQAPGKEREFVASISARLDVTYYADSVKGRFTISRDDARNTVYLQMNSLKPEDTAVYYCNVTGWHRVRYFVEYWGQGTQVTVSS

SEQ ID NO: 9943 - protein, 120 aa, synthetic construct
EVQLVESGGGLVQAGDSLRLSCTASGVVPGVVEMGWFRQAPGKEREFVASISGHDVYTYYADSVKGRFTISRDDARNTVYLQMNSLKPEDTAVYYCNVTGLTNMRVCEYWGQGTQVTVSS

SEQ ID NO: 9944 - protein, 121 aa, synthetic construct
EVQLVESGGGLVQAGDSLRLSCTASGGLGVILEMGWFRQAPGKEREFVASISGTDFVTYYADSVKGRFTISRDDARNTVYLQMNSLKPEDTAVYYCRDSLWDGHGVVKEYWGQGTQVTVSS

SEQ ID NO: 9945 - protein, 123 aa, synthetic construct
EVQLVESGGGLVQAGDSLRLSCTASGVNDGVIEMGWFRQAPGKEREFVASISGRGIYTYYADSVKGRFTISRDDARNTVYLQMNSLKPEDTAVYYCNVSAMNFAPGLRLQEYWGQGTQVTVSS

SEQ ID NO: 9946 - protein, 124 aa, synthetic construct
EVQLVESGGGLVQAGDSLRLSCTASGRRIVFKGMGWFRQAPGKEREFVASISGFRTNTYYADSVKGRFTISRDDARNTVYLQMNSLKPEDTAVYYCNVLSDNQVIMGVASLEYWGQGTQVTVSS

SEQ ID NO: 9947 - protein, 119 aa, synthetic construct
EVQLVESGGGLVQAGDSLRLSCTASGCTGATVEMGWFRQAPGKEREFVASISGGSWGTYYADSVKGRFTISRDDARNTVYLQMNSLKPEDTAVYYCNVTTIVRVFQEYWGQGTQVTVSS

SEQ ID NO: 9948 - protein, 120 aa, synthetic construct
EVQLVESGGGLVQAGDSLRLSCTASGMKGHFVEMGWFRQAPGKEREFVASISGMMNYTYYADSVKGRFTISRDDARNTVYLQMNSLKPEDTAVYYCNVCMVIDGRFKEYWGQGTQVTVSS

SEQ ID NO: 9949 - protein, 120 aa, synthetic construct
EVQLVESGGGLVQAGDSLRLSCTASGQAIVFRAMGWFRQAPGKEREFVASISGFHGDTYYADSVKGRFTISRDDARNTVYLQMNSLKPEDTAVYYCNVHEVYVAVVREYWGQGTQVTVSS

SEQ ID NO: 9950 - protein, 120 aa, synthetic construct
EVQLVESGGGLVQAGDSLRLSCTASGRRIVFGGMGWFRQAPGKEREFVASISGFGEKTYYADSVKGRFTISRDDARNTVYLQMNSLKPEDTAVYYCNVIDPASDTLPEYWGQGTQVTVSS

SEQ ID NO: 9951 - protein, 120 aa, synthetic construct
EVQLVESGGGLVQAGDSLRLSCTASGSRIVFRYMGWFRQAPGKEREFVASISDFRTITYYADSVKGRFTISRDDARNTVYLQMNSLKPEDTAVYYCNVIEIDMRKGAEYWGQGTQVTVSS

SEQ ID NO: 9952 - protein, 125 aa, synthetic construct
EVQLVESGGGLVQAGDSLRLSCTASGLGHVIIEMGWFRQAPGKEREFVASISATCRYTYYADSVKGRFTISRDDARNTVYLQMNSLKPEDTAVYYCNVTVLVREGHRMFGFLEYWGQGTQVTVSS

SEQ ID NO: 9953 - protein, 120 aa, synthetic construct
EVQLVESGGGLVQAGDSLRLSCTASGVTGVAVEMGWFRQAPGKEREFVASISGQDVYTYYADSVKGRFTISRDDARNTVYLQMNSLKPEDTAVYYCNVVCCHKWIFKEYWGQGTQVTVSS

SEQ ID NO: 9954 - protein, 121 aa, synthetic construct
EVQLVESGGGLVQAGDSLRLSCTASGHEPNVLEMGWFRQAPGKEREFVASISMLRMYTYYADSVKGRFTISRDDARNTVYLQMNSLKPEDTAVYYCNVWTMVSRRGFAEYWGQGTQVTVSS

SEQ ID NO: 9955 - protein, 125 aa, synthetic construct
EVQLVESGGGLVQAGDSLRLSCTASGDLVNALTMGWFRQAPGKEREFVASISTQGYATYYADSVKGRFTISRDDARNTVYLQMNSLKPEDTAVYYCNVVVVKVRQGTAFVWTEYWGQGTQVTVSS

SEQ ID NO: 9956 - protein, 119 aa, synthetic construct
EVQLVESGGGLVQAGDSLRLSCTASGYSGLVVEMGWFRQAPGKEREFVASISGCNGYTYYADSVKGRFTISRDDARNTVYLQMNSLKPEDTAVYYCNVTIFGREKTEYWGQGTQVTVSS

SEQ ID NO: 9957 - protein, 121 aa, synthetic construct
EVQLVESGGGLVQAGDSLRLSCTASGMIKGILEMGWFRQAPGKEREFVASISARNEYTYYADSVKGRFTISRDDARNTVYLQMNSLKPEDTAVYYCNVTGLGNDFVFKEYWGQGTQVTVSS

SEQ ID NO: 9958 - protein, 121 aa, synthetic construct
EVQLVESGGGLVQAGDSLRLSCTASGWIMVVVEMGWFRQAPGKEREFVASISGRSMYTYYADSVKGRFTISRDDARNTVYLQMNSLKPEDTAVYYCNVVGFSEWNGFFEYWGQGTQVTVSS

SEQ ID NO: 9959 - protein, 121 aa, synthetic construct
EVQLVESGGGLVQAGDSLRLSCTASGQEKDLLEMGWFRQAPGKEREFVASISRSVEYTYYADSVKGRFTISRDDARNTVYLQMNSLKPEDTAVYYCNVVVHIPGIGFGEYWGQGTQVTVSS

SEQ ID NO: 9960 - protein, 120 aa, synthetic construct
EVQLVESGGGLVQAGDSLRLSCTASGSSAQLIEMGWFRQAPGKEREFVASISWLETYTYYADSVKGRFTISRDDARNTVYLQMNSLKPEDTAVYYCNVARVHDWMFEEYWGQGTQVTVSS

SEQ ID NO: 9961 - protein, 125 aa, synthetic construct
EVQLVESGGGLVQAGDSLRLSCTASGTGCGFLEMGWFRQAPGKEREFVASISGLRHSTYYADSVKGRFTISRDDARNTVYLQMNSLKPEDTAVYYCNVTVLMRMNSRAVGFAEYWGQATQVTVSS

SEQ ID NO: 9962 - protein, 120 aa, synthetic construct
EVQLVESGGGLVQAGDSLRLSCTASGVNGIVMDMGWFRQAPGKEREFVASISSSGEYTYYADSVKGRFTISRDDARNTVYLQMNSLKPEDTAVYYCNVTVLDVGSFKEYWGQGTQVTVSS

SEQ ID NO: 9963 - protein, 123 aa, synthetic construct
EVQLVESGGGLVQAGDSLRLSCTASGVGSGVVEMGWFRQAPGKEREFVASISARHAWTYYADSVKGRFTISRDDARNTVYLQMNSLKPEDTAVYYCNVTVIDRTIYVVFREYWGQGTQVTVSS

SEQ ID NO: 9964 - protein, 120 aa, synthetic construct
EVQLVESGGGLVQAGDSLRLSCTASGFVRMLLEMGWFRQAPGKEREFVASISVQRGITYYADSVKGRFTISRDDARNTVYLQMNSLKPEDTAVYYCNVTGIEIARFVEYWGQGTQVTVSS

SEQ ID NO: 9965 - protein, 122 aa, synthetic construct
EVQLVESGGGLVQAGDSLRLSCTASGPGVVILEMGWFRQAPGKEREFVASISGRAVYTYYADSVKGRFTISRDDARNTVYLQMNSLKPEDTAVYYCNVWINSNQLMDSREYWGQGTQVTVSS

SEQ ID NO: 9966 - protein, 120 aa, synthetic construct
EVQLVESGGGLVQAGDSLRLSCTASGLAIVFQGMGWFRQAPGKEREFVASISGFGYRTYYADSVKGRFTISRDDARNTVYLQMNSLKPEDTAVYYCNVNDSAVHAVVEYWGQGTQVTVSS

SEQ ID NO: 9967 - protein, 119 aa, synthetic construct
EVQLVESGGGLVQAGDSLRLSCTASGSRTVFRAMGWFRQAPGKEREFVASISGFHELTYYADSVKGRFTISRDDARNTVYLQMNSLKPEDTAVYYCNVDQVMGKGLEYWGQGTQVTVSS

SEQ ID NO: 9968 - protein, 121 aa, synthetic construct
EVQLVESGGGLVQAGDSLRLSCTASGSTTYMIEMGWFRQAPGKEREFVASISRRGSYTYYADSVKGRFTISRDDARNTVYLQMNSLKPEDTAVYYCNVTGIRPELGRVEYWGQGTQVTVSS

SEQ ID NO: 9969 - protein, 118 aa, synthetic construct
EVQLVESGGGLVQAGDSLRLSCTASGCLRPFIEMGWFRQAPGKEREFVASISEDMTYTYYADSVKGRFTISRDDARNTVYLQMNSLKPEDTAVYYCNVTSTVHFREYWGQGTQVTVSS

SEQ ID NO: 9970 - protein, 120 aa, synthetic construct
EVQLVESGGGLVQAGDSLRLSCTASGDPQAVLEMGWFRQAPGKEREFVASISGVGVDTYYADSVKGRFTISRDDARNTVYLQMNSLKPEDTAVYYCNLWSYDSSGFDEYWGQGTQVTVSS

SEQ ID NO: 9971 - protein, 120 aa, synthetic construct
EVQLVESGGGLVQAGDSLRLSCTASGRPVTVLEMGWFRQAPGKEREFVASISCNQGYTYYADSVKGRFTISRDDARNTVYLQMNSLKPEDTAVYYCNVVVVRAVTFDEYWGQGTQVTVSS

SEQ ID NO: 9972 - protein, 120 aa, synthetic construct
EVQLVESGGGLVQAGDSLRLSCTASGRAGILLEMGWFRQAPGKEREFVASISGSHVGTYYADSVKGRFTISRDDARNTVYLQMNSLKPEDTAVYYCNVTTIGNGRVHEYWGQGTQVTVSS

SEQ ID NO: 9973 - protein, 123 aa, synthetic construct
EVQLVESGGGLVQAGDSLRLSCTASGVVGSVLEMGWFRQAPGKEREFVSSISGFKAVTYYADSVKGRFTISRDDARNTVYLQMNSLKPEDTAVYYCNVLRVHGVENVVDTEYWGQGTQVTVSS

SEQ ID NO: 9974 - protein, 120 aa, synthetic construct
EVQLVESGGGLVQAGDSLRLSCTASGSRGITLEMGWFRQAPGKEREFVASISGFGISTYYADSVKGRFTISRDDARNTVYLQMNSLKPEDTAVYYCNVTRVLQFRFEEYWGQGTQVTVSS

SEQ ID NO: 9975 - protein, 124 aa, synthetic construct
EVQLVESGGGLVQAGDSLRLSCTASGERKYVLEMGWFRQAPGKEREFVASISGHGGLTYYADSVKGRFTISRDDARNTVYLQMNSLKPEDTAVYYCNVTLFVLAGRCGGFSEYWGQGTQVTVSS

SEQ ID NO: 9976 - protein, 119 aa, synthetic construct
EVQLVESGGGLVQAGDSLRLSCTASGDVRKQIEMGWFRQAPGKEREFVASISIGNAFTYYADSVKGRFTISRDDARNTVYLQMNSLKPEDTAVYYCNVTALGSRFFEYWGQGTQVTVSS

SEQ ID NO: 9977 - protein, 120 aa, synthetic construct
EVQLVESGGGLVQAGDSLRLSCTASGRRICFTDMGWFRQAPGKEREFVASISGFGLRTYYADSVKGRFTISRDDARNTVYLQMNSLKPEDTAVYYCNVESQTQGHNAEYWGQGTQVTVSS

SEQ ID NO: 9978 - protein, 120 aa, synthetic construct
EVQLVESGGGLVQAGDSLRLSCTASGAMVLALEMGWFRQAPGKEREFVASISGRTRYTYYADSVKGRFTISRDDARNTVYLQMNSLKPEDTAVYYCNVATIQDGRFVEYWGQGTQVTVSS

SEQ ID NO: 9979 - protein, 121 aa, synthetic construct
EVQLVESGGGLVQAGDSLRLSCTASGGKMWAIEMGWFRQAPGKEREFVASISVHHDYTYYADSVKGRFTISRDDARNTVYLQMNSLKPEDTAVYYCNVTAIGPNTYFSEYWGQGTQVTVSS

SEQ ID NO: 9980 - protein, 120 aa, synthetic construct
EVQLVESGGGLVQAGDSLRLSCTASGNVLEVIGMGWFRQAPGKEREFVASISTNGGVTYYADSVKGRFTISRDDARNTVYLQMNSLKPEDTAVYYCNVTSIGRYRFVEYWGQGTQVTVSS

SEQ ID NO: 9981 - protein, 120 aa, synthetic construct
EVQLVESGGGLVQAGDSLRLSCTASGVVRRMSIMGWFRQAPGKEREFVASISGPADVTYYADSVKGRFTISRDDARNTVYLQMNSLKPEDTAVYYCNVVAMRPRGIDEYWGQGTQVTVSS

SEQ ID NO: 9982 - protein, 123 aa, synthetic construct
EVQLVESGGGLVQAGDSLRLSCTASGDRGQVIEMGWFRQAPGKEREFVASISNREKAYTYYADSVKGRFTISRDDARNTVYLQMNSLKPEDTAVYYCNVSIYLMGARIFGEYWGQGTQVTVSS

SEQ ID NO: 9983 - protein, 112 aa, synthetic construct
EVQLVESGGGLVQAGDSLRLSCTASGPHGSGSMMGWFRQAPGKEREFVAVIFRRIETYYADSVKGRFTISRDDARNTVYLQMNSLKPEDTAVYYCNVDGEYWGQGTQVTVSS

SEQ ID NO: 9984 - protein, 120 aa, synthetic construct
EVQLVESGGGLVQAGDSLRLSCTASGITGVILEMGWFRQAPGKEREFVASISTGGIYTYYADSVKGRFTISRDDARNTVYLQMNSLKPEDTAVYYCNVVLLVKTMFKEYWGQGTQVTVSS

SEQ ID NO: 9985 - protein, 125 aa, synthetic construct
EVQLVESGGGLVQAGDSLRLSCTASGCSDGPIEMGWFRQAPGQEREFVASISRDMSYTYYADSVKGRFTISRDDARNTVYLQMNSLKPEDTAVYYCNVTCVCYKADHKMSFKEYWGQGTQVTVSS

SEQ ID NO: 9986 - protein, 122 aa, synthetic construct
EVQLVESGGGLVQAGDSLRLSCTASGLDLTLIEMGWFRQAPGKEREFVASISMIDTYTYYADSVKGRFTISRDDARNTVYLQMNSLKPEDTAVYYCNVTHVSKVKPVFIEYWGQGTQVTVSS

SEQ ID NO: 9987 - protein, 121 aa, synthetic construct
EVQLVESGGGLVQAGDSLRLSCTASGKVAGILEMGWFRQAPGKEREFVASISGNALYTYYADSVKGRFTISRDDARNTVYLQMNSLKPEDTAVYYCNVTVLFGRGVLREYWGQGTQVTVSS

SEQ ID NO: 9988 - protein, 120 aa, synthetic construct
EVQLVESGGGLVQAGDSLRLSCTASGEPVMCVEMGWFRQAPGKEREFVASISGVGVATYYADSVKGRFTISRDDARNTVYLQMNSLKPEDTAVYYCNVTVCGVGGFKEYWGQGTQVTVSS

SEQ ID NO: 9989 - protein, 123 aa, synthetic construct
EVQLVESGGGLVQAGDSLRLSCTASGGVMGIIEMGWFRQAPGKEREFVASISYASNYTYYADSVKGRFTISRDDARNTVYLQMNSLKPEDTAVYYCNVTGLNRIPVRRFVEYWGQGTQVTVSS

SEQ ID NO: 9990 - protein, 120 aa, synthetic construct
EVQLVESGGGLVQAGDSLRLSCTASGLVSIILEMGWFRQAPGKEREFVASISGRSVYTYYADSVKGRFTISRDDARNTVYLQMNSLKPEDTAVYYCNVAIVGSGRIIEYWGQGTQVTVSS

SEQ ID NO: 9991 - protein, 121 aa, synthetic construct
EVQLVESGGGLVQAGDSLRLSCTASGATRRVLEMGWFRQAPGKEREFVASISMMYDYTYYADSVKGRFTISRDDARNTVYLQMNSLKPEDTAVYYCNVVIMDSDDRFQEYWGQGTQVTVSS

SEQ ID NO: 9992 - protein, 119 aa, synthetic construct
EVQLVESGGGLVQAGDSLRLSCTASGGVGMMIEMGWFRQAPGKEREFVASISVSSAGTYYADSVKGRFTISRDDARNTVYLQMNSLKPEDTAVYYCRGTVLMDGIREYWGQGTQVTVSS

SEQ ID NO: 9993 - protein, 118 aa, synthetic construct
EVQLVESGGGLVQAGDSLRLSCTASGKRLVFMDMGWFRQAPGKEREFVASISGFQTMTYYADSVKGRFTISRDDARNTVYLQMNSLKPEDTAVYYCNVVASASKSEYWGQGTQVTVSS

SEQ ID NO: 9994 - protein, 121 aa, synthetic construct
EVQLVESGGGLVQAGDSLRLSCTASGLSGFVVEMGWFRQAPGKEREFVASISTAGVYTYYADSVKGRFTISRDDARNTVYLQMNSLKPEDTAVYYCNVVCINRNWTFVEYWGQGTQVTVSS

SEQ ID NO: 9995 - protein, 117 aa, synthetic construct
EVQLVESGGGLVQAGDSLRLSCTASGDPSDHIIMGWFRQAPGKEREFVASISGRASSTYYADSVKGRFTISRDDARNTVYLQMNSLKPEDTAVYYCNVITNRIREYWGQGTQVTVSS

SEQ ID NO: 9996 - protein, 121 aa, synthetic construct
EVQLVESGGGLVQAGDSLRLSCTASGMKVGMIEMGWFRQAPGKEREFVASISVRDGHTYYADSVKGRFTISRDDARNTVYLQMNSLKPEDTAVYYCNVTAVNSNCRFSEYWGQGTQVTVSS

SEQ ID NO: 9997 - protein, 120 aa, synthetic construct
EVQLVESGGGLVQAGDSLRLSCTASGMHHCILEMGWFRQAPGKEREFVASISGKGWTTYYADSVKGRFTISRDDARNTVYLQMNSLKPEDTAVYYCNVTVHVVHEFLEYWGQGTQVTVSS

SEQ ID NO: 9998 - protein, 123 aa, synthetic construct
EVQLVESGGGLVQAGDSLRLSCTASGSVSQVVEMGWFRQAPGKEREFVASISGMGIYTYYADSVKGRFTISRDDARNTVYLQMNSLKPEDTAVYYCNVTWLNHIGVFDLREYWGQGTQVTVSS

SEQ ID NO: 9999 - protein, 120 aa, synthetic construct
EVQLVESGGGLVQAGDSLRLSCTASGNRIVFRDMGWFRQAPGKEREFVASISGSRWDTYYADSVKGRFTISRDDARNTVYLQMNSLKPEDTAVYYCNVIRADHVELLEYWGQGTQVTVSS

SEQ ID NO: 10000 - protein, 120 aa, synthetic construct
EVQLVESGGGLVQAGDSLRLSCTASGDGTTVIEMGWFRQAPGKEREFVASISGNKVYTYYADSVKGRFTISRDDARNTVYLQMNSLKPEDTAVYYCNVTGIGCGLVVEYWGQGTQVTVSS

SEQ ID NO: 10001 - protein, 120 aa, synthetic construct
EVQLVESGGGLVQAGDSLRLSCTASGSMDDVIEMGWFRQAPGKEREFVASISGLSKATYYADSVKGRFTISRDDARNTVYLQMNSLKPEDTAVYYCNVTSLTTNKFLEYWGQGTQVTVSS

SEQ ID NO: 10002 - protein, 120 aa, synthetic construct
EVQLVESGGGLVQAGDSLRLSCTASGDIRFVLEMGWFRQAPGKEREFVASISGSRQYTYYADSVKGRFTISRDDARNTVYLQMNSLKPEDTAVYYCNVTFVQGNKLVEYWGQGTQVTVSS

SEQ ID NO: 10003 - protein, 121 aa, synthetic construct
EVQLVESGGGLVQAGDSLRLSCTASGLHVTFVEMGWFRQAPGKEREFVASISWGHVYTYYADSVKGRFTISRDDARNTVYLQMNSLKPEDTAVYYCNVVGHDPQSGFSEYWGQGTQVTVSS

SEQ ID NO: 10004 - protein, 119 aa, synthetic construct
EVQLVESGGGLVQAGDSLRLSCTASGYTRHVLEMGWFRQAPGKEREFVASISGRLDYTYYADSVKGRFTISRDDARNTVYLQMNSLKPEDTAVYYCNVTELRDRVKEYWGQGTQVTVSS

SEQ ID NO: 10005 - protein, 120 aa, synthetic construct
EVQLVESGGGLVQAGDSLRLSCTASGGDHGTIEMGWFRQAPGKEREFVASISVMSSYTYYADSVEGRFTISRDDARNTVYLQMNSLKPEDTAVYYCNFTNVEAVGFFEYWGQGTQVTVSS

SEQ ID NO: 10006 - protein, 118 aa, synthetic construct
EVQLVESGGGLVQAGDSLRLSCTASGLIQRAILMGWFRQAPGKEREFVASSLGRGTYYADSVKGRFTISRDDARNTVYLQMNSLKPEDTAVYYCNVIGGFEDHCVEYWGQGTQVTVSS

SEQ ID NO: 10007 - protein, 123 aa, synthetic construct
EVQLVESGGGLVQAGDSLRLSCTASGGRIVFENMGWFRQAPGKEREFVASISGYGGRTYYADSVKGRFTISRDDARNTVYLQMNSLKPEDTAVYYCNVDGPTEGGRSAGVEYWGQGTQVTVSS

SEQ ID NO: 10008 - protein, 121 aa, synthetic construct
EVQLVESGGGLVQAGDSLRLSCTASGMATGVVEMGWFRQAPGKEREFVASISGSRVYTYYADSVKGRFTISRDDARNTVYLQMNSLKPEDTAVYYCNVIKFTVDRGFNEYWGQGTQVTVSS

SEQ ID NO: 10009 - protein, 119 aa, synthetic construct
EVQLVESGGGLVQAGDSLRLSCTASGQNSNVIEMGWFRQAPGKEREFVASISGAGLYTYYADSVKGRFTISRDDARNTVYLQMNSLKPEDTAVYYCNVVQLKVVFVEYWGQGTQVTVSS

SEQ ID NO: 10010 - protein, 120 aa, synthetic construct
EVQLVESGGGLVQAGDSLRLSCTASGTGGMICEMGWFRQAPGKEREFVASISGRNVYTYYADSVKGRFTISRDDARNTVYLQMNSLKPEDTAVYYCNVTVVGIEGFMEYWGQGTQVTVSS

SEQ ID NO: 10011 - protein, 119 aa, synthetic construct
EVQLVESGGGLVQAGDSLRLSCTASGFNLVFLDMGWFRQAPGKEREFVASISGFGYKTYYADSVKGRFTISRDDARNTVYLQMNSLKPEDTAVYYCNVGEKLNVLEEYWGQGTQVTVSS

SEQ ID NO: 10012 - protein, 120 aa, synthetic construct
EVQLVESGGGLVQAGDSLRLSCTASGNNIVFRGMGWFRQAPGKEREFVASISGFHGLTYYADSVKGRFTISRDDARNTVYLQMNSLKPEDTAVYYCNVAEACSRDVVEYWGQGTQVTVSS

SEQ ID NO: 10013 - protein, 123 aa, synthetic construct
EVQLVESGGGLVQAGDSLRLSCTASGSGAHILEMGWFRQAPGKEREFVASISGSSDYTYYADSVKGRFTISRDDARNTVYLQMNSLKPEDTAVYYCNVVDLDLFRVSIIREYWGQGTQVTVSS

SEQ ID NO: 10014 - protein, 120 aa, synthetic construct
EVQLVESGGGLVQAGDSLRLSCTASGMLGVVMEMGWFRQAPGKEREFVASISGARDYTYYADSVKGRFTISRDDARNTVYLQMNSLKPEDTAVYYCNVSCIESVSFAEYWGQGTQVTVSS

SEQ ID NO: 10015 - protein, 120 aa, synthetic construct
EVQLVESGGGLVQAGDSLRLSCTASGNVLELVEMGWFRQAPGKEREFVASISGSNGSTYYADSVKGRFTISRDDARNTVYLQMNSLKPEDTAVYYCNVTSFIGLGFREYWGQGTQVTVSS

SEQ ID NO: 10016 - protein, 125 aa, synthetic construct
EVQLVESGGGLVQAGDSLRLSCTASGFRLVFRSMGWFRQAPGKEREFVASISWRWVDTYYADSVKGRFTISRDDARNTVYLQMNSLKPEDTAVYYCNVMETMIGKGTIVQVGEYWGQGTQVTVSS

SEQ ID NO: 10017 - protein, 119 aa, synthetic construct
EVQLVESGGGLVQAGDSLRLSCTASTTDVRVEMGWFRQAPGKEREFVASISGQNRYTYYADSVKGRFTISRDDARNTVYLQMNSLKPEDTAVYYCNVVVFNMMKFEEYWGQGTQVTVSS

SEQ ID NO: 10018 - protein, 119 aa, synthetic construct
EVQLVESGGGLVQAGDSLRLSCTASGCSRAVLEMGWFRQAPGKEREFVASISGDRRSTYYADSVKGRFTISRDDARNTVYLQMNSLKPEDTAVYYCNVTTFISSFEEYWGQGTQVTVSS

SEQ ID NO: 10019 - protein, 120 aa, synthetic construct
EVQLVESGGGLVQAGDSLRLSCTASGNSVGALEMGWFRQAPGKEREFVASISGLTVDTYYADSVKGRFTISRDDARNTVYLQMNSLKPEDTAVYYERVTVLVGERFIEYWGQGTQVTVSS

SEQ ID NO: 10020 - protein, 121 aa, synthetic construct
EVQLVESGGGLVQAGDSLRLSCTASGVCDGLIEMGWFRQAPGKEREFVASISMGTDYTYYADSVKGRFTISRDDARNTVYLQMNSLKPEDTAVYYCNVVKLRAMLAFVEYWGQGTQVTVSS

SEQ ID NO: 10021 - protein, 120 aa, synthetic construct
EVQLVESGGGLVQAGDSLRLSCTASGGVLRVIEMGWFRQAPGKEREFVASISGQSAYTYYADSVKGRFTISRDDARNTVYLQMNSLKPEDTAVYYCNVYTLILSAFIEYWGQGTQVTVSS

SEQ ID NO: 10022 - protein, 121 aa, synthetic construct
EVQLVESGGGLVQAGDSLRLSCTASGKEVLLGRMGWFRQAPGKEREFVASISTRKDMTYYADSVKGRFTISRDDARNTVYLQMNSLKPEDTAVYYCNVESVHRCDFMDEYWGQGTQVTVSS

SEQ ID NO: 10023 - protein, 124 aa, synthetic construct
EVQLVESGGGLVQAGDSLRLSCTASGGRVVFKMMGWFRQAPGKEREFVASISGFGTATYYADSVKGRFTISRDDARNTVYLQMNSLKPEDTAVYYCNVMDGHEYPARDRVVEYWGQGTQVTVSS

SEQ ID NO: 10024 - protein, 121 aa, synthetic construct
EVQLVESGGGLVQAGDSLRLSCTASGTHNNMLEMGWFRQAPGKEREFVASISQVGRCTYYADSVKGRFTISRDDARNTVYLQMNSLKPEDTAVYYCNVTCLTVNMTFIEYWGQGTQVTVSS

SEQ ID NO: 10025 - protein, 121 aa, synthetic construct
EVQLVESGGGLVQAGDSLRLSCTASGDMRYSLVMGWFRQAPGKEREFVASISARLLNTYYADSVKGRFTISRDDARNTVYLQMNSLKPEDTAVYYCNVIAIKPGSGWNEYWGQGTQVTVSS

SEQ ID NO: 10026 - protein, 120 aa, synthetic construct
EVQLVESGGGLVQAGDSLRLSCTASGQRLLIGEMGWFRQAPGKEREFVASISTVGCYTYYADSVKGRFTISRDDARNTVYLQMNSLKPEDTAVYYCNVSGFSGAVFLEYWGQGTQVTVSS

SEQ ID NO: 10027 - protein, 121 aa, synthetic construct
EVQLVESGGGLVQAGDSLRLSCTASGVRSPVLEMGWFRQAPGKEREFVASISGGGEYTYYADSVKGRFTISRDDARNTVYLQMNSLKPEDTAVYYCNVVVVSRTLLFVEYWGQGTQVTVSS

SEQ ID NO: 10028 - protein, 120 aa, synthetic construct
EVQLVESGGGLVQAGDSLRLSCTASGYRIVFAPMGWFRQAPGKEREFVASISGFKNVTYYADSVKGRFTISRDDARNTVYLQMNSLKPEDTAVYYCNVVQVDDQSDLEYWGQGTQVTVSS

SEQ ID NO: 10029 - protein, 119 aa, synthetic construct
EVQLVESGGGLVQAGDSLRLSCTASGDMVRVIEMGWFRQAPGKEREFVASISDEVFYTYYADSVKGRFTISRDDARNTVYLQMNSLKPEDTAVYYCNVTAIGDGIKEYWGQGTQVTVSS

SEQ ID NO: 10030 - protein, 120 aa, synthetic construct
EVQLVESGGGLVQAGDSLRLSCTASGWISNVLEMGWFRQAPGKEREFVASISMGVAYTYYADSVKGRFTISRDDARNTVYLQMNSLKPEDTAVYYCNVLMIRKVGFVEYWGQGTQVTVSS

SEQ ID NO: 10031 - protein, 117 aa, synthetic construct
EVQLVESGGGLVQAGDSLRLSCTASGGPYRFLEMGWFRQAPGKEREFVASISMRHDYTYYADSVKGRFTISRDDTRNTVYLQMNSLKPEDTAVYYCNVVRMTFDEYWGQGTQVTVSS

SEQ ID NO: 10032 - protein, 121 aa, synthetic construct
EVQLVESGGGLVQAGDSLRLSCTASGVPGNMIEMGWFRQAPGKEREFVASISGLDRATYYADSVKGRFTISRDDARNTVYLQMNSLKPEDTAVYYCNVTVLRWNATFREYWGQGTQVTVSS

SEQ ID NO: 10033 - protein, 122 aa, synthetic construct
EVQLVESGGGLVQAGDSLRLSCTASGMRTVFQDMGWFRQAPGKEREFVASISGFGGLTYYADSVKGRFTISRDDARNTVYLQMNSLKPEDTAVYYCNVDVPRVRRGLVCEYWGQGTQVTVSS

SEQ ID NO: 10034 - protein, 119 aa, synthetic construct
EVQLVESGGGLVQAGDSLRLSCTASGVMGSIMEMGWFRQAPGKEREFVASISGGGNYTYYADSVKGRFTISRDDARNTVYLQMNSLKPEDTAVYYCNVLCVSNRVREYWGQGTQVTVSS

SEQ ID NO: 10035 - protein, 117 aa, synthetic construct
EVQLVESGGGLVQAGDSLRLSCTASGILDRVMEMGWFRQAPGKEREFVASISFTDIVTYYADSVKGRFTISRDDARNTVYLQMNSLKPEDTAVYYCNVTTKCFREYWGQGTQVTVSS

SEQ ID NO: 10036 - protein, 120 aa, synthetic construct
EVQLVESGGGLVQAGDSLRLSCTASGNYIRPLEMGWFRQAPGKEREFVASISGVLTDTYYADSVKGRFTISRDDARNTVYLQMNSLKPEDTAVYYCNVTIFTGVAFAEYWGQGTQVTVSS

SEQ ID NO: 10037 - protein, 121 aa, synthetic construct
EVQLVESGGGLVQAGDSLRLSCTASGDALQAFEMGWFRQAPGKEREFVASISTRDAATYYADSVKGRFTISRDDARNTVYLQMNSLKPEDTAVYYLRCTVFTQAVFFREYWGQGTQVTVSS

SEQ ID NO: 10038 - protein, 121 aa, synthetic construct
EVQLVESGGGLVQAGDSLRLSCTASGNRQRMLEMGWFRQAPGKEREFVASISFHGTYTYYADSVKGRFTISRDDARNTVYLQMNSLKPEDTAVYYCNVTVVRVHIGFVEYWGQGTQVTVSS

SEQ ID NO: 10039 - protein, 122 aa, synthetic construct
EVQLVESGGGLVQAGDSLRLSCTASGDTGVVLEMGWFRQAPGKEREFVASISGRGICTYYADSVKGRFTISRDDARNTVYLQMNSLKPEDTAVYYCNVTGLSVMPVRKMEYWGQGTQVTVSS

SEQ ID NO: 10040 - protein, 120 aa, synthetic construct
EVQLVESGGGLVQAGDSLRLSCTASGHAKNVLEMGWFRQAPGKEREFVASISMRRSDTYYADSVKGRFTISRDDARNTVYLQMNSLKPEDTAVYYCNVTVVYKICFMEYWGQGTQVTVSS

SEQ ID NO: 10041 - protein, 125 aa, synthetic construct
EVQLVESGGGLVQAGDSLRLSCTASGTVDPVLEMGWFRQAPGKEREFVASISMPSIYTYYADSVKGRFTISRDDARNTVYLQMNSLKPEDTAVYYCNVTMFGVGVDGVISFCEYWGQGTQVTVSS

SEQ ID NO: 10042 - protein, 124 aa, synthetic construct
EVQLVESGGGLVQAGDSLRLSCTASGRHPMGAEMGWFRQAPGKEREFVASISVQKDYTYYADSVKGRFTISRDDARNTVYLQMNSLKPEDTAVYYCNVAGFSVTQQGIGRVEYWGQGTQVTVSS

SEQ ID NO: 10043 - protein, 121 aa, synthetic construct
EVQLVESGGGLVQAGDSLRLSCTASGPLHSVLEMGWFRQAPGKEREFVASISMAGDYTYYADSVKGRFTISRDDARNTVYLQMNSLKPEDTAVYYCNVSAIDERSRLREYWGQGTQVTVSS

SEQ ID NO: 10044 - protein, 119 aa, synthetic construct
EVQLVESGGGLVQAGDSLRLSCTASGTGENMVFMGWFRQAPGKEREFVASISIGHGNTYYADSVKGRFTISRDDARNTVYLQMNSLKPEDTAVYYCNVIGWFQTQCEYWGQGTQVTVSS

SEQ ID NO: 10045 - protein, 119 aa, synthetic construct
EVQLVESGGGLVQAGDSLRLSCTASGNKHQMLEMGWFRQAPGKEREFVASISISRDATYYADSVKGRFTISRDDARNTVYLQMNSLKPEDTAVYYCNVTVIINSFREYWGQGTQVTVSS

SEQ ID NO: 10046 - protein, 119 aa, synthetic construct
EVQLVESGGGLVQAGDSLRLSCTASGSMKIIIEMGWFRQAPGKEREFVASISGHLDYTYYADSVKGRFTISRDDARNTVYLQMNSLKPEDTAVYYCNVCVLSQGFIEYWGQGTQVTVSS

SEQ ID NO: 10047 - protein, 124 aa, synthetic construct
EVQLVESGGGLVQAGDSLRLSCTASGRLLGVIEMGWFRQAPGKEREFVASISGMDDYTYYADSVKGRFTISRDDARNTVYLQMNSLKPEDTAVYYCNVTDVSWKVDKLVFSEYWGQGTQVTVSS

SEQ ID NO: 10048 - protein, 121 aa, synthetic construct
EVQLVESGGGLVQAGDSLRLSCTASGNRVNVLEMGWFRQAPGKEREFVASISGSGVYTYYADSVKGRFTISRDDARNTVYLQMNSLKPEDTAVYYCNVTGIDNGRFVVEYWGQGTQVTVSS

SEQ ID NO: 10049 - protein, 121 aa, synthetic construct
EVQLVESGGGLVQAGDSLRLSCTASGLLGRVIEMGWFRQAPGKEREFVASISGNNVTTYYADSVKGRFTISRDDARNTVYLQMNSLKPEDTAVYYCNVTMIGVRWAFTEYWGQGTQVTVSS

SEQ ID NO: 10050 - protein, 119 aa, synthetic construct
EVQLVESGGGLVQAGDSLRLSCTASGVQGMIVEMGWFRQAPGKEREFVASISCTGAYTYYADSVKGRFTISRDDARNTVYLQMNSLKPEDTAVYYCNVASFSVMFLEYWGQGTQVTVSS

SEQ ID NO: 10051 - protein, 120 aa, synthetic construct
EVQLVESGGGLVQAGDSLRLSCTASGVEGVVLEMGWFRQAPGKEREFVASISGGNVFTYYADSVKGRFTISRDDARNTVYLQMNSLKPEDTAVYYCNVVVFAKDGFREYWGQGTQVTVSS

SEQ ID NO: 10052 - protein, 120 aa, synthetic construct
EVQLVESGGGLVQAGDSLRLSCTASGLTGAIIEMGWFRQAPGKEREFVASISDTVFYTYYADSVKGRFTISRDDARNTVYLQMNSLKPEDTAVYYCNVTGINLGYFVEYWGQGTQVTVSS

SEQ ID NO: 10053 - protein, 119 aa, synthetic construct
EVQLVESGGGLVQAGDSLRLSCTASGGMDFIEMGWFRQAPGKEREFVASISFNGAYTYYADSVKGRFTISRDDARNTVYLQMNSLKPEDTAVYYCNVTVQSILRFKEYWGQGTQVTVSS

SEQ ID NO: 10054 - protein, 121 aa, synthetic construct
EVQLVESGGGLVQAGDSLRLSCTASGTNIVFRTMGWFRQAPGKEREFVASISGFGWVTYYADSVKGRFTISRDDARNTVYLQMNSLKPEDTAVYYCNVLRGDDDSLIEEYWGQGTQVTVSS

SEQ ID NO: 10055 - protein, 119 aa, synthetic construct
EVQLVESGGGLVQAGDSLRLSCTASGSMHKMLEMGWFRQAPGKEREFVASISGFGPSTYYADSVKGRFTISRDDARNTVYLQMNSLKPEDTAVYYARFSGFSNGFVEYWGQGTQVTVSS

SEQ ID NO: 10056 - protein, 120 aa, synthetic construct
EVQLVESGGGLVQAGDSLRLSCTASGDSAVLIEMGWFRQAPGKEREFVASISGRHGLTYYADSVKGRFTISRDDARNTVYLQMNSLKPEDTAVYYCNVTVHKGGRFAEYWGQGTQVTVSS

SEQ ID NO: 10057 - protein, 120 aa, synthetic construct
EVQLVESGGGLVQAGDSLRLSCTASGEINNVLEMGWFRQAPGKEREFVASISTSGGYTYYADSVKGRFTISRDDARNTVYLQMNSLKPEDTAVYYCNVVRLVVMKFVEYWGQGTQVTVSS

SEQ ID NO: 10058 - protein, 122 aa, synthetic construct
EVQLVESGGGLVQAGDSLRLSCTASGNLKNMVEMGWFRQAPGKEREFVASISMMRTYTYYADSVKGRFTISRDDARNTVYLQMNSLKPEDTAVYYCNVTCLNEALVHFHEYWGQGTQVTVSS

SEQ ID NO: 10059 - protein, 120 aa, synthetic construct
EVQLVESGGGLVQAGDSLRLSCTASGRAGYVMEMGWFRQAPGKEREFVASISGHADWTYYADSVKGRFTISRDDARNTVYLQMNSLKPEDTAVYYCNVTTLLNGIFLEYWGQGTQVTVSS

SEQ ID NO: 10060 - protein, 120 aa, synthetic construct
EVQLVESGGGLVQAGDSLRLSCTASGEINNGVEMGWFRQAPGKEREFVASISCVHMYTYYADSVKGRFTISRDDARNTVYLQMNSLKPEDTAVYYCNVVHIREFRFAEYWGQGTQVTVSS

SEQ ID NO: 10061 - protein, 124 aa, synthetic construct
EVQLVESGGGLVQAGDSLRLSCTASGDRTVFKEMGWFRQAPGKEREFVASISAFHGFTYYADSVKGRFTISRDDARNTVYLQMNSLKPEDTAVYYCNFILTNLSEHEMAFGEYWGQGTQVTVSS

SEQ ID NO: 10062 - protein, 120 aa, synthetic construct
EVQLVESGGGLVQAGDSLRLSCTASGNVTDVLEMGWFRQAPGKEREFVASISSRDTATYYADSVKGRFTISRDDARNTVYLQMNSLKPEDTAVYYCNVTAVMHRRFVEYWGQGTQVTVSS

SEQ ID NO: 10063 - protein, 120 aa, synthetic construct
EVQLVESGGGLVQAGDSLRLSCTASGLGVGVLEMGWFRQAPGKEREFVASISVRVGGTYYADSVKGRFTISRDDARNTVYLQMNSLKPEDTAVYYCNVTVFGDYRFSEYWGQGTQVTVSS

SEQ ID NO: 10064 - protein, 123 aa, synthetic construct
EVQLVESGGGLVQAGDSLRLSCTASGIHGVVVEMGWFRQAPGKEREFVASISRHCDYTYYADSVKGRFTISRDDARNTVYLQMNSLKPEDTAVYYCNVVNVVAGVGAFFLEYWGQGTQVTVSS

SEQ ID NO: 10065 - protein, 117 aa, synthetic construct
EVQLVESGGGLVQAGDSLRLSCTASGVSGIRALMGWFRQAPGKEREFVASISIEGRMTYYADSVKGRFTISRDDARNTVYLQMNSLKPEDTAVYYCNVISFPWREYWGQGTQVTVSS

SEQ ID NO: 10066 - protein, 121 aa, synthetic construct
EVQLVESGGGLVQAGDSLRLSCTASGPTGNKVEMGWFRQAPGKEREFVASISWSRGSTYYADSVKGRFTISRDDARNTVYLQMNSLKPEDTAVYYCNVTTHVLMTGFSEYWGQGTQVTVSS

SEQ ID NO: 10067 - protein, 119 aa, synthetic construct
EVQLVESGGGLVQAGDSLRLSCTASGHRNRVVEMGWFRQAPGKEREFVASISGGSSYTYYADSVKGRFTISRDDARNTVYLQMNSLKPEDTAVYYCNVVVLLSGLHEYWGQGTQVTVSS

SEQ ID NO: 10068 - protein, 124 aa, synthetic construct
EVQLVESGGGLVQAGDSLRLSCTASGIMGRTIEMGWFRQAPGKEREFVASISGMNGSTYYADSVKGRFTISRDDARNTVYLQMNSLKPEDTAVYYCNVTVMRVGSNSWNFYEYWGQGTQVTVSS

SEQ ID NO: 10069 - protein, 121 aa, synthetic construct
EVQLVESGGGLVQAGDSLRLSCTASGCKVTVLEMGWFRQAPGKEREFVASISGRAEYTYYADSVKGRFTISRDDARNTVYLQMNSLKPEDTAVYYCNVTVCSSNFVFAEYWGQGTQVTVSS

SEQ ID NO: 10070 - protein, 121 aa, synthetic construct
EVQLVESGGGLVQAGDSLRLSCTASGYEGDVVEMGWFRQAPGKEREFVASISGATMYTYYADSVKGRFTISRDDARNTVYLQMNSLKPEDTAVYYCNVTIFGRILLILEYWGQGTQVTVSS

SEQ ID NO: 10071 - protein, 120 aa, synthetic construct
EVQLVESGGGLVQAGDSLRLSCTASGLRGRRIEMGWFRQAPGKEREFVASISANDARTYYADSVKGRFTISRDDARNTVYLQMNSLKPEDTAVYYCNVTVVLVGRFIEYWGQGTQVTVSS

SEQ ID NO: 10072 - protein, 119 aa, synthetic construct
EVQLVESGGGLVQAGDSLRLSCTASGLEQTIVEMGWFRQAPGKEREFVASISGNLGLTYYADSVKGRFTISRDDARNTVYLQMNSLKPEDTAVYYCNVTSWRSGFFEYWGQGTQVTVSS

SEQ ID NO: 10073 - protein, 120 aa, synthetic construct
EVQLVESGGGLVQAGDSLRLSCTASGVATAPIEMGWFRQAPGKEREFVASISVTCLYTYYADSVKGRFTISRDDARNTVYLQMNSLKPEDTAVYYCNVTVVDRIGIDEYWGQGTQVTVSS

SEQ ID NO: 10074 - protein, 118 aa, synthetic construct
EVQLVESGGGLVQAGDSLRLSCTAWSSSAIEMGWFRQAPGKEREFVASISMITRYTYYADSVKGRFTISRDDARNTVYLQMNSLKPEDTAVYYCNVTYLTVLGFAEYWGQGTQVTVSS

SEQ ID NO: 10075 - protein, 120 aa, synthetic construct
EVQLVESGGGLVQAGDSLRLSCTASGCIMMLIEMGWFRQAPGKEREFVASISVRDRVTYYADSVKGRFTISRDDARNTVYLQMNSLKPEDTAVYYCNVTAFCGVQFIEYWGQGTQVTVSS

SEQ ID NO: 10076 - protein, 119 aa, synthetic construct
EVQLVESGGGLVQAGDSLRLSCTASGGVKKVIEMGWFRQAPGKEREFVASISCQGIYTYYADSVKGRFTISRDDARNTVYLQMNSLKPEDTAVYYCNVVSVSNMIFEYWGQGTQVTVSS

SEQ ID NO: 10077 - protein, 121 aa, synthetic construct
EVQLVESGGGLVQAGDSLRLSCTASGIRWPVVEMGWFRQAPGKEREFVASISGVGAYTYYADSVKGRFTISRDDARNTVYLQMNSLKPEDTAVYYCNVLEVTARGQITEYWGQGTQVTVSS

SEQ ID NO: 10078 - protein, 120 aa, synthetic construct
EVQLVESGGGLVQAGDSLRLSCTASGVMFQVVEMGWFRQAPGKEREFVASISGTSTYTYYADSVKGRFTISRDDARNTVYLQMNSLKPEDTAVYYCNVVLATESRFAEYWGQGTQVTVSS

SEQ ID NO: 10079 - protein, 120 aa, synthetic construct
EVQLVESGGGLVQAGDSLRLSCTASGLAGMVLEMGWFRQAPGKEREFVASISGVGRRTYYADSVKGRFTISRDDARNTVYLQMNSLKPEDTAVYYCNVTVIYLGRIVEYWGQGTQVTVSS

SEQ ID NO: 10080 - protein, 120 aa, synthetic construct
EVQLVESGGGLVQAGDSLRLSCTASDNHDLVLEMGWFRQVPGKEREFVASISGFRVYTYYADSVKGRFTISRDDARNTVYLQMNSLKPEDTAVYYCNVCTGKSYQGMEYWGQGTQVTVSS

SEQ ID NO: 10081 - protein, 111 aa, synthetic construct
EVQLVESGGGLVQAGDSLRLSCTASGSDVKGHGMGWFRQAPGKEREFVAISLMAFPTYYADSVKGRFTISRDDARNTVYLQMNSLKPEDTAVYYCNVDEYWGQGTQVTVSS

SEQ ID NO: 10082 - protein, 122 aa, synthetic construct
EVQLVESGGGLVQAGDSLRLSCTASGNVHDVIEMGWFRQAPGKEREFVASISGNNWYTYYADSVKGRFTISRDDARNTVYLQMNSLKPEDTAVYYCNVTDLDISHRRLFEYWGQGTQVTVSS

SEQ ID NO: 10083 - protein, 120 aa, synthetic construct
EVQLVESGGGLVQAGDSLRLSCTASGETGIVLEMGWFRQAPGKEREFVASISGQNWYTYYADSVKGRFTISRDDARNTVYLQMNSLKPEDTAVYYCNVVLTKTKTFQEYWGQGTQVTVSS

SEQ ID NO: 10084 - protein, 121 aa, synthetic construct
EVQLVESGGGLVQAGDSLRLSCTASGTHRWVLEMGWFRQAPGKEREFVASISGTQTYTYYADSVKGRFTISRDDARNTVYLQMNSLKPEDTAIYYCNVTMLSTAWRPHEYWGQGTQVTVSS

SEQ ID NO: 10085 - protein, 121 aa, synthetic construct
EVQLVESGGGLVQAGDSLRLSCTASGMRTVFVVMGWSRQAPGKEREFVASISGFGGCTYYADSVKGRFTISRDDARNTVYLQMNSLKPEDTAVYYCNVTRHVSGRGFLEYWGQGTQVTVSS

SEQ ID NO: 10086 - protein, 119 aa, synthetic construct
EVQLVESGGGLVQAGDSLRLSCTASGGMGVILEMGWFRQAPGKEREFVASISSNKYYTYYADSVKGRFTISRDDARNTVYLQMNSLKPEDTAVYYCNVSALGEGFIEYWGQGTQVTVSS

SEQ ID NO: 10087 - protein, 120 aa, synthetic construct
EVQLVESGGGLVQAGDSLRLSCTASGSMRWVWAMGWFRQAPGKEREFVASIFRKVGTYYADSVKGRFTISRDDARNTVYLQMNSLKPEDTAVYYCNVECEIDDYRLVEYWGQGTQVTVSS

SEQ ID NO: 10088 - protein, 120 aa, synthetic construct
EVQLVESGGGLVQAGDSLRLSCTASGGGVHWLEMGWFRQAPGKEREFVASISGVGTYTYYADSVKGRFTISRDDARNTVYLQMNSLKPEDTAVYYCNVDAISRDRYVEYWGQGTQVTVSS

SEQ ID NO: 10089 - protein, 121 aa, synthetic construct
EVQLVESGGGLVQAGDSLRLSCTASGSFASIIEMGWFRQAPGKEREFVASISGVMLYTYYADSVKGRFTISRDDARNTVYLQMNSLKPEDTAVYYCNVTAVSRRNGFLEYWGQGTQVTVSS

SEQ ID NO: 10090 - protein, 120 aa, synthetic construct
EVQLVESGGGLVQAGDSLRLSCTASGRNGVILEMGWFRQAPGKEREFVASISGCMGYTYYADSVKGRFTISRDDARNTVYLQMNSLKPEDTAVYYCNVTGLLFGRFVEYWGQGTQVTVSS

SEQ ID NO: 10091 - protein, 119 aa, synthetic construct
EVQLVESGGGLVQAGDSLRLSCTASGMSGGILEMGWFRQAPGKEREFVASISIRTGGTYYADSVKGRFTISRDDARNTVYLQMNSLKPEDTAVYYCNVTTWGRSFKEYWGQGTQVTVSS

SEQ ID NO: 10092 - protein, 122 aa, synthetic construct
EVQLVESGGGLVQAGDSLRLSCTASGTIHNILEMGWFRQAPGKEREFVASISGNTLWTYYADSVKGRFTISRDDARNTVYLQMNSLKPEDTAVYYCNVTRIDRHIYRFVEYWGQGTQVTVSS

SEQ ID NO: 10093 - protein, 121 aa, synthetic construct
EVQLVESGGGLVQAGDSLRLSCTASGKGGKLIEMGWFRQAPGKEREFVASISSSHHATYYADSVKGRFTISRDDARNTVYLQMNSLKPEDTAVYYCNVTVLISNVGFREYWGQGTQVTVSS

SEQ ID NO: 10094 - protein, 120 aa, synthetic construct
EVQLVESGGGLVQAGDSLRLSCTASGLGKRWMEMGWFRQAPGKEREFVASISMTGTYTYYADSVKGRFTISRDDARNTVYLQMNSLKPEDTAVYYCNVTSLCEQRLREYWGQGTQVTVSS

SEQ ID NO: 10095 - protein, 119 aa, synthetic construct
EVQLVESGGGLVQAGDSLRLSCTASGNKTGAVEMGWFRQAPGKEREFVASISIRNVYTYYADSVKGRFTISRDDARNTVYLQMNSLKPEDTAVYYCNVTICNRRFVEYWGQGTQVTVSS

SEQ ID NO: 10096 - protein, 119 aa, synthetic construct
EVQLVESGGGLVQAGDSLRLSCTASGIKGSVIEMGWFRQAPGKEREFVASISGIVVYTYYADSVKGRFTISRDDARNTVYLQMNSLKPEDTAVYYCNVVALARQFDEYWGQGTQVTVSS

SEQ ID NO: 10097 - protein, 120 aa, synthetic construct
EVQLVESGGGLVQAGDSLRLSCTASGNLVDVLEMGWFRQAPGKEREFVASISYRWPLTYYADSVKGRFTISRDDARNTVYLQMNSLKPEDTAVYYCNVTVVTLYRFLEYWGQGTQVTVSS

SEQ ID NO: 10098 - protein, 119 aa, synthetic construct
EVQLVESGGGLVQAGDSLRLSCTASGRRIVFSDMGWFRQAPGKESEFVASISGFNTVTYYADSVKGRFTISRDDARNTVYLQMNSLKPEDTAVYYCNVSRAESCECEYWGQGTQVTVSS

SEQ ID NO: 10099 - protein, 121 aa, synthetic construct
EVQLVESGGGLVQAGDSLRLSCTASGWRIVFKEMGWFRQAPGKEREFVASISGYHGITYYADSVKGRFTISRDDARNTVYLQMNSLKPEDTAVYYCNVVDIKCSRRRMEYWGQGTQVTVSS

SEQ ID NO: 10100 - protein, 117 aa, synthetic construct
EVQLVESGGGLVQAGDSLRLSCTASGCLNQVMIMGWFRQAPGKEREFVASISGPSAVTYYADSVKGRFTISRDDARNTVYLQMNSLKPEDTAVYYCNVVTHRIREYWGQGTQVTVSS

SEQ ID NO: 10101 - protein, 121 aa, synthetic construct
EVQLVESGGGLVQAGDSLRLSCTASGKVRAIVEMGWFRQAPGKEREFVASISGHGDYTYYADSVKGRFTISRDDARNTVYLQMNSLKPEDTAVYYCNVTVIDPLVVFREYWGQGTQVTVSS

SEQ ID NO: 10102 - protein, 119 aa, synthetic construct
EVQLVESGGGLVQAGDSLRLSCTASGMKGVVMEMGWFRQAPGKEREFVASISWRQGNTYYADSVKGRFTISRDDARNTVYLQMNSLKPEDTAVYYCNVTLVSFWLGEYWGQGTQVTVSS

SEQ ID NO: 10103 - protein, 119 aa, synthetic construct
EVQLVESGGGLVQAGDSLRLSCTASGAQGLMMEMGWFRQAPGKEREFVASISLRQGYTYYADSVKGRFTISRDDARNTVYLQMNSLKPEDTAVYYCNVTVLQATFKEYWGQGTQVTVSS

SEQ ID NO: 10104 - protein, 119 aa, synthetic construct
EVQLVESGGGLVQAGDSLRLSCTASGVTGLMLCMGWFRQAPGKEREFVASISVRDRTTYYADSVKGRFTISRDDARNTVYLQMNSLKPEDTAVYYCNVTTLCVRFVEYWGQGTQVTVSS

SEQ ID NO: 10105 - protein, 119 aa, synthetic construct
EVQLVESGGGLVQAGDSLRLSCTASGTFRHVVEMGWFRQAPGKEREFVASISGLATFTYYADSVKGRFTISRDDARNTVYLQMNSLKPEDTAVYYCNVTTCDHHFEEYWGQGTQVTVSS

SEQ ID NO: 10106 - protein, 117 aa, synthetic construct
EVQLVESGGGLVQAGDSLRLSCTASGMSNMLVIMGWFRQAPGKEREFVASISGVRAVTYYADSVKGRFTISRDDARNTVYLQMNSLKPEDTAVYYCNVVDHRIIEYWGQGTQVTVSS

SEQ ID NO: 10107 - protein, 123 aa, synthetic construct
EVQLVESGGGLVQAGDSLRLSCTASGNDQPWMEMGWFRQAPGKEREFVASISGHRLYTYYADSVKGRFTISRDDARNTVYLQMNSLKPEDTAVYYCNVTILRLGGQVRWVEYWGQGTQVTVSS

SEQ ID NO: 10108 - protein, 121 aa, synthetic construct
EVQLVESGGGLVQAGDSLRLSCTASGHLEDALEMGWFRQAPGKEREFVASISVKGNLTYYADSVKGRFTISRDDARNTVYLQMNSLKPEDTAVYYCNVTSLNMAHGFVEYWGQGTQVTVSS

SEQ ID NO: 10109 - protein, 122 aa, synthetic construct
EVQLVESGGGLVQAGDSLRLSCTASGIKAQVVEMGWFRQAPGKEREFVASISGNDKNTYYADSVKGRFTISRDDARNTVYLQMNSLKPEDTAVYYCNVTCFSRGVRVFVEYWGQGTQVTVSS

SEQ ID NO: 10110 - protein, 120 aa, synthetic construct
EVQLVESGGGLVQAGDSLRLSCTASGDSRTFLEMGWFRQAPGKEREFVASISGSHVYTYYADSVKGRFTISRDDARNTVYLQMNSLKPEDTAVYYCNVSSLLALRMVEYWGQGTQVTVSS

SEQ ID NO: 10111 - protein, 120 aa, synthetic construct
EVQLVESGGGLVQAGDSLRLSCTASGVRGVGLEMGWFRQAPGKEREFVASISVANGDTYYADSVKGRFTISRDDARNTVYLQMNSLKPEDTAVYYCNVTVWACGDFVEYWGQGTQVTVSS

SEQ ID NO: 10112 - protein, 120 aa, synthetic construct
EVQLVESGGGLVQAGDSLRLSCTASGVAGVLLEMGWFRQAPGKEREFVASISGAWRYTYYADSVKGRFTISRDDARNTVYLQMNSLKPEDTAVYYCNVVTHETVSFREYWGQGTQVTVSS

SEQ ID NO: 10113 - protein, 119 aa, synthetic construct
EVQLVESGGGLVQAGDSLRLSCTASGEVMRIVEMGWFRQAPGKEREFVASISGTGLYTYYADSVKGRFTISRDDARNTVYLQMNSLKPEDTAVYYCNVSIISSGIKEYWGQGTQVTVSS

SEQ ID NO: 10114 - protein, 121 aa, synthetic construct
EVQLVESGGGLVQAGDSLRLSCTASGNEGVVIDMGWFRQAPGKEREFVASISGGCRYTYYADSVKGRFTISRDDARNTVYLQMNSLKPEDTAVYYCNVTTLSSHLMFVEYWGQGTQVTVSS

SEQ ID NO: 10115 - protein, 121 aa, synthetic construct
EVQLVESGGGLVQAGDSLRLSCTASGADQIVLEMGWFRQAPGKEREFVASISGSGTYTYYADSVKGRFTISRDDARNTVYLQMNSLKPEDTAVYYCNVTSIAGNARLREYWGQGTQVTVSS

SEQ ID NO: 10116 - protein, 121 aa, synthetic construct
EVQLVESGGGLVQAGDSLRLSCTASGTHAGLIEMGWFRQAPGKEREFVASISMASVYTYYADSVKGRFTISRDDARNTVYLQMNSLKPEDTAVYYCNVSKFTFVSGLREYWGQGTQVTVSS

SEQ ID NO: 10117 - protein, 120 aa, synthetic construct
EVQLVESGGGLVQAGDSLRLSCTASGRHHGVVEMGWFRQAPGKEREFVASISGRGICTYYADSVKGRFTISRDDARNTVYLQMNSLKPEDTAVYYCNVTVFVNGGFQEYWGQGTQVTVSS

SEQ ID NO: 10118 - protein, 120 aa, synthetic construct
EVQLVESGGGLVQAGDSLRLSCTASGNGDSVLEMGWFRQAPGKEREFVASISGRGSNTYYADSVKGRFTISRDDARNTVYLQMNSLKPEDTAVYYCNVVLWEDFKFTEYWGQGTQVTVSS

SEQ ID NO: 10119 - protein, 125 aa, synthetic construct
EVQLVESGGGLVQAGDSLRLSCTASGVQGIRIEMGWFRQAPGKEREFVASISAYCDYTYYADSVKGRFTISRDDARNTVYLQMNSLKPEDTAVYYCNVTAMMTVPANYIGFCEYWGQGTQVTVSS

SEQ ID NO: 10120 - protein, 122 aa, synthetic construct
EVQLVESGGGLVQAGDSLRLSCTASGPASSWVEMGWFRQAPGKEREFVASISKVGEYTYYADSVKGRFTISRDDARNTVYLQMNSLKPEDTAVYYCNVTAMRLFRPFILEYWGQGTQVTVSS

SEQ ID NO: 10121 - protein, 121 aa, synthetic construct
EVQLVESGGGLVQAGDSLRLSCTASGRIDGAIEMGWFRQAPGKEREFVASISARSEYTYYADSVKGRFTISRDDARNTVYLQMNSLKPEDTAVYYCNVTAVVPAGCFEEYWGQGTQVTVSS

SEQ ID NO: 10122 - protein, 119 aa, synthetic construct
EVQLVESGGGLVQAGDSLRLSCTASGTTDNLIEMGWFRQAPGKEREFVASISNYYDYTYYADSVKGRFTISRDDARNTVYLQMNSLKPEDTAVYYCNVTGINVVFVEYWGQGTQVTVSS

SEQ ID NO: 10123 - protein, 121 aa, synthetic construct
EVQLVESGGGLVQAGDSLRLSCTASGRGVVVVEMGWFRQAPGKEREFVASISGRGAYTYYADSVKGRFTISRDDARNTVYLQMNSLKPEDTAVYYCNVTGLSGCGTFDEYWGQGTQVTVSS

SEQ ID NO: 10124 - protein, 119 aa, synthetic construct
EVQLVESGGGLVQAGDSLRLSCTASGWMKGVIEMGWFRQAPGKEREFVASISMASGYTYYADSVKGRFTISRDDARNTVYLQMNSLKPEDTAVYYCNVTVLLIRFIEYWGQGTQVTVSS

SEQ ID NO: 10125 - protein, 121 aa, synthetic construct
EVQLVESGGGLVQAGDSLRLSCTASGGVRTIWYMGWFRQAPGKEREFVASISGPGPSTYYADSVKGRFTISRDDARNTVYLQMNSLKPEDTAVYYCNVWGVTETYVFVEYWGQGTQVTVSS

SEQ ID NO: 10126 - protein, 122 aa, synthetic construct
EVQLVESGGGLVQAGDSLRLSCTASGDIDMVIEMGWFRQAPGKEREFVASISGSRMTTYYADSVKGRFTISRDDARNTVYLQMNSLKPEDTAVYYCNVTTFRLSVGSFCEYWGQGTQVTVSS

SEQ ID NO: 10127 - protein, 120 aa, synthetic construct
EVQLVESGGGLVQAGDSLRLSCTASGDGKIVVEMGWFRQAPGKEREFVASISGKRNYTYYADSVKGRFTISRDDARNTVYLQMNSLKPEDTAVYYCNVTRVDHLGFEEYWGQGTQVTVSS

SEQ ID NO: 10128 - protein, 119 aa, synthetic construct
EVQLVESGGGLVQAGDSLRLSCTASGLLGILVDMGWFRQAPGKEREFVASISSKAGYTYYADSVKGRFTISRDDARNTVYLQMNSLKPEDTAVYYCNVVVFVKKFLEYWGQGTQVTVSS

SEQ ID NO: 10129 - protein, 119 aa, synthetic construct
EVQLVESGGGLVQAGDSLRLSCTASGRVMEVLEMGWFRQAPGKEREFVASISGNSKFTYYADSVKGRFTISRDDARNTVYLQMNSLKPEDTAVYYCNVTIWKRGFIEYWGQGTQVTVSS

SEQ ID NO: 10130 - protein, 120 aa, synthetic construct
EVQLVESGGGLVQAGDSLRLSCTASGVIGMVVEMGWFRQAPGKEREFVASISGMGAGTYYADSVKGRFTICRDDARNTVYLQMNSLKPEDTAVYYCNVTVINDMGFKEYWGQGTQVTVSS

SEQ ID NO: 10131 - protein, 120 aa, synthetic construct
EVQLVESGGGLVQAGDSLRLSCTASGRTWGLIEMGWFRQAPGKEREFVASISSGLAYTYYADSVKGRFTISRDDARNTVYLQMNSLKPEDTAVYYCNVTIMDMVVFKEYWGQGTQVTVSS

SEQ ID NO: 10132 - protein, 120 aa, synthetic construct
EVQLVESGGGLVQAGDSLRLSCTASGSTGRIIEMGWFRQAPGKEREFVASISADAARTYYADSVKGRFTISRDDARNTVYLQMNSLKPEDTAVYYCNVTGFRIEGFIEYWGQGTQVTVSS

SEQ ID NO: 10133 - protein, 112 aa, synthetic construct
EVQLVESGGGLVQAGDSLRLSCTASGKDGMRSWMGWFRQAPGKEREFVAVSMSLCTTYYADSVKGRFTISRDDARNTVYLQMNSLKPEDTAVYYCNVDGEYWGQGTQVTVSS

SEQ ID NO: 10134 - protein, 121 aa, synthetic construct
EVQLVESGGGLVQAGDSLRLSCTASGVKIVFKGMGWFRQAPGKEREFVASISWDWDGTYYADSVKGRFTISRDDARNTVYLQMNSLKPEDTAVYYCNVVDSLMGDIGIEYWGQGTQVTVSS

SEQ ID NO: 10135 - protein, 119 aa, synthetic construct
EVQLVESGGGLVQAGDSLRLSCTASGFIGRVMEMGWFRQAPGKEREFVASISGVNGETYYADSVKGRFTISRDDARNTVYLQMNSLKPEDTAVYYCNVTLMKKRFWEYWGQGTQVTVSS

SEQ ID NO: 10136 - protein, 123 aa, synthetic construct
EVQLVESGGGLVQAGDSLRLSCTASGIKAGALSMGWFRQAPGKEREFVADINRAALTYYADSVKGRFTISRDDARNTVYLQMNSLKPEDTAVYYCNVVDYVVTNLMGGFVEYWGQGTQVTVSS

SEQ ID NO: 10137 - protein, 120 aa, synthetic construct
EVQLVESGGGLVQAGDSLRLSCTASGSDDEVIEMGWFRQAPGKEREFVASISNRRSYTYYADSVKGRFTISRDDARNTVYLQMNSLKPEDTAVYYCNVTAVVRVRFLEYWGQGTQVTVSS

SEQ ID NO: 10138 - protein, 120 aa, synthetic construct
EVQLVESGGGLVQAGDSLRLSCTASGVRGVVLEMGWFRQAPGKEREFVASISANQASTYYADSVKGRFTISRDDARNTVYLQMNSLKPEDTAVYYCNVTAYRLLGFWEYWGQGTQVTVSS

SEQ ID NO: 10139 - protein, 125 aa, synthetic construct
EVQLVESGGGLVQAGDSLRLSCTASGRGQLVMEMGWFRQAPGKEREFVASISGHSAYTYYADSVKGRFTISRDDARNTVYLQMNSLKPEDTAVYYCNVVTIVLDGCNRLVKVEYWGQGTQVTVSS

SEQ ID NO: 10140 - protein, 117 aa, synthetic construct
EVQLVESGGGLVQAGDSLRLSCTASGRPVGVIEMGWFRQAPGKEREFVASISGSGVYTYYADSVKGRFTISRDDARNTVYLQMNSLKPEDTAVYYCNVMYRDFVEYWGQGTQVTVSS

SEQ ID NO: 10141 - protein, 120 aa, synthetic construct
EVQLVESGGGLVQAGDSLRLSCTASGIRGNQLEMGWFRQAPGKEREFVASISNRASRTYYADSVKGRFTISRDDARNTVYLQMNSLKPEDTAVYYCNVTVFAGHQFVEYWGQGTQVTVSS

SEQ ID NO: 10142 - protein, 120 aa, synthetic construct
EVQLVESGGGLVQAGDSLRLSCTASGWGGDAIEMGWFRQAPGKEREFVASISVTRSGTYYADSVKGRFTISRDDARNTVYLQMNSLKPEDTAVYYCNVTVFRMMNFSEYWGQGTQVTVSS

SEQ ID NO: 10143 - protein, 121 aa, synthetic construct
EVQLVESGGGLVQAGDSLRLSCTASGLRLVFQPMGWFRQAPGKEREFVASISGFGTNTYYADSVKGRFTISRDDARNTVYLQMNSLKPEDTAVYYCNVVMRGVTGCDVEYWGQGTQVTVSS

SEQ ID NO: 10144 - protein, 119 aa, synthetic construct
EVQLVESGGGLVQAGDSLRLSCTASGRMSVIIEMGWFRQAPGKEREFVASISGRTRHTYYADSVKGRFTISRDDARNTVYLQMNSLKPEDTAVYYCNVTIFDGCFSEYWGQGTQVTVSS

SEQ ID NO: 10145 - protein, 120 aa, synthetic construct
EVQLVESGGGLVQAGDSLRLSCTASGGNEAKVEMGWFRQAPGKEREFVASISGSVSYTYYADSVKGRFTISRDDARNTVYLQMNSLKPEDTAVYYCNVVIFGPCGFTEYWGQGTQVTVSS

SEQ ID NO: 10146 - protein, 120 aa, synthetic construct
EVQLVESGGGLVQAGDSLRLSCTASGMLNGMLEMGWFRQAPGKEREFVASISVQAAFTYYADSVKGRFTISRDDARNTVYLQMNSLKPEDTAVYYCNVTMAYEWRFLEYWGQGTQVTVSS

SEQ ID NO: 10147 - protein, 121 aa, synthetic construct
EVQLVESGGGLVQAGDSLRLSCTASGDTWWWMEMSWFRQAPGKEREFVASISNREHITYYADSVKGRFTISRDDARNTVYLQMNSLKPEDTAVYYCNVTVVDLRRGFGEYWGQGTQVTVSS

SEQ ID NO: 10148 - protein, 124 aa, synthetic construct
EVQLVESGGGLVQAGDSLRLSCTASGMGPLWLEMGWFRQAPGKEREFVASISNGAGSTYYADSVKGRFTISRDDARNTVYLQMNSLKPEDTAVYYCNVTNVESREARLMFMEYWGQGTQVTVSS

SEQ ID NO: 10149 - protein, 121 aa, synthetic construct
EVQLVESGGGLVQAGDSLRLSCTASGRRLVFESMGWFRQAPGKEREFVASISGFGGTTYYAYSVKGRFTISRDDARNTVYLQMNSLKPEDTAVYYCNVPTVMIEKDQGEYWGQGTQVTVSS

SEQ ID NO: 10150 - protein, 120 aa, synthetic construct
EVQLVESGGGLVQAGDSLRLSCTASGIANLWLEMGWFRQAPGKEREFVASISRRLGSTYYADSVKGRFTISRDDARNTVYLQMNSLKPEDTAVYYCNVTGVSSHGFDEYWGQGTQVTVSS

SEQ ID NO: 10151 - protein, 119 aa, synthetic construct
EVQLVESGGGLVQAGDSLRLSCTASGGIAKIVEMGWFRQAPGKEREFVASISTDGLYTYYADSVKGRFTISRDDARNTVYLQMNSLKPEDTAVYYCNVVVIENRFVEYWGQGTQVTVSS

SEQ ID NO: 10152 - protein, 121 aa, synthetic construct
EVQLVESGGGLVQAGDSLRLSCTASGVIDKILEMGWFRQAPGKEREFVASISARSEYTYYADSVKGRFTISRDDARNTVYLQMNSLKPEDTAVYYCNVTAVVPAGCFEEYWGQGTQVTVSS

SEQ ID NO: 10153 - protein, 120 aa, synthetic construct
EVQLVESGGGLVQAGDSLRLSCTASGCTNDMLEMGWFRQAPGKEREFVASISVWMHRTYYADSVKGRFTISRDDARNTVYLQMNSLKPEDTAVYYCNVTTFGNFRFLEYWGQGTQVTVSS

SEQ ID NO: 10154 - protein, 118 aa, synthetic construct
EVQLVESGGGLVQAGDSLRLSCTASGKKNVEVRMGWFRQAPGKEREFVASISNTRGSTYYADSVKGRFTISRDDARNTVYLQMNSLKPEDTAVYYCNVLITVPWEEYWGQGTQVTVSS

SEQ ID NO: 10155 - protein, 119 aa, synthetic construct
EVQLVESGGGLVQAGDSLRLSCTASGCINRFVEMGWFRQAPGKEREFVASISGSMAYTYYADSVKGRFTISRDDARNTVYLQMNSLKPEDTAVYYCNVWQCNQGFKEYWGQGTQVTVSS

SEQ ID NO: 10156 - protein, 119 aa, synthetic construct
EVQLVESGGGLVQAGDSLRLSCTASGLEEGLLEMGWFRQAPGKEREFVASISMTHDYTYYADSVKGRFTISRDDARNTVYLQMNSLKPEDTAVYYCNVTVVNGGVTEYWGQGTQVTVSS

SEQ ID NO: 10157 - protein, 119 aa, synthetic construct
EVQLVESGGGLVQAGDSLRLSCTASGLRDGTLEMGWFRQAPGKEREFVASISVNGNGTYYADSVKGRFTISRDDARNTVYLQMNSLKPEDTAVYYCNVTVFRNAFAEYWGQGTQVTVSS

SEQ ID NO: 10158 - protein, 121 aa, synthetic construct
EVQLVESGGGLVQAGDSLRLSCTASGTFMEMGWFRQAPGKEREFVASISGMSCYTYYADSVKGRFTISRDDARNTVYLQMNSLKPEDTAVYYCNVTTVKLDEGVVMLMEYWGQGTQVTVSS

SEQ ID NO: 10159 - protein, 124 aa, synthetic construct
EVQLVESGGGLVQAGDSLRLSCTASGNVGSMLEMGWFRQAPGKEREFVASISNQGTYTYYADSVKGRFTISRDDARNTVYLQMNSLKPEDTAVYYCNVTFVDWVNYGVHVREYWGQGTQVTVSS

SEQ ID NO: 10160 - protein, 120 aa, synthetic construct
EVQLVESGGGLVQAGDSLRLSCTASGIVEGMFEMGWFRQAPGKEREFVASISDRLGDTYYADSVKGRFTISRDDARNTVYLQMNSLKPEDTAVYYCNVSCFVFPALTEYWGQGTQVTVSS

SEQ ID NO: 10161 - protein, 120 aa, synthetic construct
EVQLVESGGGLVQAGDSLRLSCTASGRRTSVLEMGWFRQAPGKEREFVASTSGTGMYTYYADSVKGRFTISRDDARNTVYLQMNSLKPEDTAVYYCNVTHWLAPVLVEYWGQGTQVTVSS

SEQ ID NO: 10162 - protein, 121 aa, synthetic construct
EVQLVESGGGLVQAGDSLRLSCTASGNDLIVVEMGWFRQAPGKEREFVASISGNTRYTYYADSVKGRFTISRDDARNTVYLQMNSLKPEDTAVYYCNVTQLEVPLHFVEYWGQGTQVTVSS

SEQ ID NO: 10163 - protein, 120 aa, synthetic construct
EVQLVESGGGLVQAGDSLRLSCTASGVDGGIIEMGWFRQAPGKEREFVASISGSCLNTYYADSVKGRFTISRDDARNTVYLQMNSLKPEDTAVYYCNVTTVGKRRFLEYWGQGTQVTVSS

SEQ ID NO: 10164 - protein, 121 aa, synthetic construct
EVQLVESGGGLVQAGDSLRLSCTASGATKSLMEMGWFRQAPGKEREFVASISVWHQYTYYADSVKGRFTISRDDARNTVYLQMNSLKPEDTAVYYCNVSGIMDTGFLGEYWGQGTQVTVSS

SEQ ID NO: 10165 - protein, 120 aa, synthetic construct
EVQLVESGGGLVQAGDSLRLSCTASGLLQGVVEMGWFRQAPGKEREFVASISGARNYTYYADSVKGRFTISRDDARNTVYLQMNSLKPEDTAVYYCNVTLVNVGGIREYWGQGTQVTVSS

SEQ ID NO: 10166 - protein, 121 aa, synthetic construct
EVQLVESGGGLVQAGDSLRLSCTASGGRARILEMGWFRQAPGKEREFVASISGHSGYTYYADSVKGRFTISRDDARNTVYLQMNSLKPEDTAVYYCNVVMVGTASVFREYWGQGTQVTVSS

SEQ ID NO: 10167 - protein, 120 aa, synthetic construct
EVQLVESGGGLVQAGDSLRLSCTASGTQARQIEMGWFRQAPGKEREFVASISIMYGDTYYADSVKGRFTISRDDARNTVYLQMNSLKPEDTAVYYCNVTCMAKMSFNEYWGQGTQVTVSS

SEQ ID NO: 10168 - protein, 117 aa, synthetic construct
EVQLVESGGGLVQAGDSLRLSCTASGKRSSILEMGWFRQAPGKEREFVASISSAREYTYYADSVKGRFTISRDDARNTVYLQMNSLKPEDTAVYYCNVTELTFIEYWGQGTQVTVSS

SEQ ID NO: 10169 - protein, 121 aa, synthetic construct
EVQLVESGGGLVQAGDSLRLSCTASGILGDIVEMGWFRQAPGKEREFVASISGSRAYTYYADSVKGRFTISRDDARNTVYLQMNSLKPEDTAVYYCNVTQLWVVSGFTEYWGQGTQVTVSS

SEQ ID NO: 10170 - protein, 118 aa, synthetic construct
EVQLVESGGGLVQAGDSLRLSCTASGQGKLVIEMGWFRQAPGKEREFVASISGMSEYTYYADSVKGRFTISRDDARNTVYLQMNSLKPEDTAVYYCNVVVGMGFMEYWGQGTQVTVSS

SEQ ID NO: 10171 - protein, 121 aa, synthetic construct
EVQLVESGGGLVQAGDSLRLSCTASGSIGSILEMGWFRQAPGKEREFVASISWCSDYTYYADSVKGRFTISRDDARNTVYLQMNSLKPEDTAVYYCNVFQRLSYVRFVEYWGQGTQVTVSS

SEQ ID NO: 10172 - protein, 120 aa, synthetic construct
EVQLVESGGGLVQAGDSLRLSCTASGTRGNSMEMGWFRQAPGKEREFVASISIHSVYTYYADSVKGRFTISRDDARNTVYLQMNSLKPEDTAVYYCNVTTLNSFGLREYWGQGTQVTVSS

SEQ ID NO: 10173 - protein, 119 aa, synthetic construct
EVQLVESGGGLVQAGDSLRLSCTASGIRGFVLEMGWFRQAPGKEREFVASISRLGGYTYYADSVKGRFTISRDDARNTVYLQMNSLKPEDTAVYYCNVTSFHAALLEYWGQGTQVTVSS

SEQ ID NO: 10174 - protein, 124 aa, synthetic construct
EVQLVESGGGLVQAGDSLRLSCTASGGINVVIEMGWFRQAPGKEREFVASISRGKDYTYYADSVKGRFTISRDDARNTVYLQMNSLKPEDTAVYYCNVTGMNIRGDRAQIDEYWGQGTQVTVSS

SEQ ID NO: 10175 - protein, 121 aa, synthetic construct
EVQLVESGGGLVQAGDSLRLSCTASGHRLVFMCMGWFRQAPGKEREFVASISGFQNVTYYADSVKGRFTISRDDARNTVYLQMNSLKPEDTAVYYCNVIRERHELECSEYWGQGTQVTVSS

SEQ ID NO: 10176 - protein, 115 aa, synthetic construct
EVQLVESGGGLVQAGDSLRLSCTASGLEMGWFRQAPGKEREFVASISRFAAYTYYADSVKGRFTISRDDARNTVYLQMNSLKPEDTAVYYCNVCDVVDMRVYEYWGQGTQVTVSS

SEQ ID NO: 10177 - protein, 120 aa, synthetic construct
EVQLVESGGGLVQAGDSLRLSCTASGTTLTVLEMGWFRQAPGKEREFVASISGVGSYTYYADSVKGRFTISRDDARNTVYLQMNSLKPEDTAVYYCNVAYMCASLFHEYWGQGTQVTVSS

SEQ ID NO: 10178 - protein, 119 aa, synthetic construct
EVQLVESGGGLVQAGDSLRLSCTASGVRGETIEMGWFRQAPGKEREFVASISGLNMDTYYADSVKGRFTISRDDARNTVYLQMNSLKPEDTAVYYCNVSVFKSRFLEYWGQGTQVTVSS

SEQ ID NO: 10179 - protein, 122 aa, synthetic construct
EVQLVESGGGLVQAGDSLRLSCTASGGMATQIEMGWFRQAPGKEREFVASISCRYGLTYYADSVKGRFTISRDDARNTVYLQMNSLKPEDTAVYYCNVTAIFLRLARFVEYWGQGTQVTVSS

SEQ ID NO: 10180 - protein, 122 aa, synthetic construct
EVQLVESGGGLVQAGDSLRLSCTASGNVSYYDLMGWFRQAPGKEREFVASISSAGCHTYYADSAKGRFTISRDDARNTVYLQMNSLKPEDTAVYYCNVGYERLVLFWANEYWGQGTQVTVSS

SEQ ID NO: 10181 - protein, 115 aa, synthetic construct
EVQLVESGGGLVQAGDSLRLSCTASGASDTIVYMGWFRQAPGKEREFVGQYICQRTYYADSVKGRFTISRDDARNTVYLQMNSLKPEDTAVYYCNVLTERIREYWGQGTQVTVSS

SEQ ID NO: 10182 - protein, 119 aa, synthetic construct
EVQLVESGGGLVQAGDSLRLSCTASSHVMTLEMGWFRQAPGKEREFVASISSGHKFTYYADSVKGRFTISRDDARNTVYLQMNSLKPEDTAVYYRRNTVISGGMIREYWGQGTQVTVSS

SEQ ID NO: 10183 - protein, 124 aa, synthetic construct
EVQLVESGGGLVQAGDSLRLSCTASGAPGDILEMGWFRQAPGKEREFVASISRKIGYTYYADSVKGRFTISRDDARNTVYLQMNSLKPEDTAVYYCNVTCWVSSMGREFFREYWGQGTQVTVSS

SEQ ID NO: 10184 - protein, 121 aa, synthetic construct
EVQLVESGGGLVQAGDSLRLSCTASGTGRYTVEMGWFRQAPGKEREFVASISGGLRYTYYADSVKGRFTISRDDARNTVYLQMNSLKPEDTAVYYCNVTTVEAMWVFKEYWGQGTQVTVSS

SEQ ID NO: 10185 - protein, 120 aa, synthetic construct
EVQLVESGGGLVQAGDSLRLSCTASGIAGEVIEMGWFRQAPGKEREFVASISRHEAYTYYADSVKGRFTISRDDARNTVYLQMNSLKPEDTAVYYCNVMGLVHRLFREYWGQGTQVTVSS

SEQ ID NO: 10186 - protein, 117 aa, synthetic construct
EVQLVESGGGLVQAGDSLRLSCTASGHNVGLIEMGWFRQAPGKEREFVASISVRRIYTYYADSVKGRFTISRDDARNTVYLQMNSLKPEDTAVYYCNVFGEDFMEYWGQGTQVTVSS

SEQ ID NO: 10187 - protein, 121 aa, synthetic construct
EVQLVESGGGLVQAGDSLRLSCTASGDMPGMLEMGWFRQAPGKEREFVASISTGLVWTYYADSVKGRFTISRDDARNTVYLQMNSLKPEDTAVYYCNVTVFDGVRGFMEYWGQGTQVTVSS

SEQ ID NO: 10188 - protein, 120 aa, synthetic construct
EVQLVESGGGLVQAGDSLRLSCTASGDLSVALEMGWFRQAPGKEREFVASISGVRSYTYYADSVKGRFTISRDDARNTVYLQMNSLKPEDTAVYYCNVTAVSRVHINEYWGQGTQVTVSS

SEQ ID NO: 10189 - protein, 121 aa, synthetic construct
EVQLVESGGGLVQAGDSLRLSCTASGVHGIMIEMGWFRQAPGKEREFVASISGRSGYTYYADSVKGRFTISRDDARNTVYLQMNSLKPEDTAVYYCNVSIMSVTNRFGEYWGQGTQVTVSS

SEQ ID NO: 10190 - protein, 121 aa, synthetic construct
EVQLVESGGGLVQAGDSLRLSCTASGNLAGMMEMGWFRQAPGKEREFVASISVTSTYTYYADSVKGRFTISRDDARNTVYLQMNSLKPEDTAVYYCNVEGFNCSMMLMEYWGQGTQVTVSS

SEQ ID NO: 10191 - protein, 119 aa, synthetic construct
EVQLVESGGGLVQAGDSLRLSCTASGMVGVVIEMGWFRQAPGKEREFVASISKRDGLTYYADSVKGRFTISRDDARNTVYLQMNSLKPEDTAVYYCNVVVIDRYFLEYWGQGTQVTVSS

SEQ ID NO: 10192 - protein, 124 aa, synthetic construct
EVQLVESGGGLVQAGDSLRLSCTASGFGGVILEMGWFRQAPGKEREFVASISKNDGYTYYADSVKGRFTISRDDARNTVYLQMNSLKPEDTAVYYCNVLIVGLVSARINIREYWGQGTQVTVSS

SEQ ID NO: 10193 - protein, 121 aa, synthetic construct
EVQLVESGGGLVQAGDSLRLSCTASGVCKDILEMGWFRQAPGKEREFVASISGRLLTTYYADSVKGRFTISRDDARNTVYLQMNSLKPEDTAVYYCNVTGFVAGTGFDEYWGQGTQVTVSS

SEQ ID NO: 10194 - protein, 120 aa, synthetic construct
EVQLVESGGGLVQAGDSLRLSCTASGNRIVFEAMGWFRQAPGKEREFVASISGFGLATYYADSVKGRFTISRDDARNTVYLQMNSLKPEDTAVYYCRRMDEVTTVGTEYWGQGTQVTVSS

SEQ ID NO: 10195 - protein, 120 aa, synthetic construct
EVQLVESGGGLVQAGDSLRLSCTASGGQDGVLEMGWFRQAPGKEREFVASISVHRNSTYYADSVKGRFTISRDDARNTVYLQMNSLKPEDTAVYYCNVTCINRHHFVEYWGQGTQVTVSS

SEQ ID NO: 10196 - protein, 121 aa, synthetic construct
EVQLVESGGGLVQAGDSLRLSCTASGSKTCMLEMGWFRQAPGKEREFVASISVREDATYYADSVKGRFTISRDDARNTVYLQMNSLKPEDTAVYYCNVTVLHVRHGFVEYWGQGTQVTVSS

SEQ ID NO: 10197 - protein, 121 aa, synthetic construct
EVQLVESGGGLVQAGDSLRLSCTASGDRKKVLEMGWFRQAPGKEREFVASISGFRWYTYYADSVKGRFTISRDDARNTVYLQMNSLKPEDTAVYYCNVVSIGNVQFFVEYWGQGTQVTVSS

SEQ ID NO: 10198 - protein, 121 aa, synthetic construct
EVQLVESGGGLVQAGDSLRLSCTASGIKGLPIEMGWFRQAPGKEREFVASISSSRMYTYYADSVKGRFTISRDDARNTVYLQMNSLKPEDTAVYYCNVSTLDVVGMFCEYWGQGTQVTVSS

SEQ ID NO: 10199 - protein, 119 aa, synthetic construct
EVQLVESGGGLVQAGDSLRLSCTASGGIVNVVEMGWFRQAPGKEREFVASISGGASYTYYADSVKGRFTISRDDARNTVYLQMNSLKPEDTAVYYCNVVVWSLNFSEYWGQGTQVTVSS

SEQ ID NO: 10200 - protein, 120 aa, synthetic construct
EVQLVESGGGLVQAGDSLRLSCTASGMRVGLIEMGWFRQAPGKEREFVASISNCHSGTYYADSVKGRFTISRDDARNTVYLQMNSLKPEDTAVYYCNVTRMIGGRFKEYWGQGTQVTVSS

SEQ ID NO: 10201 - protein, 122 aa, synthetic construct
EVQLVESGGGLVQAGDSLRLSCTASGLKAVVIEMGWFRQAPGKEREFVASISGNSQGTYYADSVKGRFTISRDDARNTVYLQMNSLKPEDTAVYYCNVTAMNAAVGLFREYWGQGTQVTVSS

SEQ ID NO: 10202 - protein, 120 aa, synthetic construct
EVQLVESGGGLVQAGDSLRLSCTASGRSGQVIEMGWFRQAPGKEREFVASISGARLETYYADSVKGRFTISRDDARNTVYLQMNSLKPEDTAVYYCNVTSYIVTKFLEYWGQGTQVTVSS

SEQ ID NO: 10203 - protein, 120 aa, synthetic construct
EVQLVESGGGLVQAGDSLRLSCTASGWKGRLMEMGWFRQAPGKEREFVASISDGSHSTYYADSVKGRFTISRDDARNTVYLQMNSLKPEDTAVYYCNVTVFTRSGFGEYWGQGTQVTVSS

SEQ ID NO: 10204 - protein, 121 aa, synthetic construct
EVQLVESGGGLVQAGDSLRLSCTASGDAKTFCNMGWFRQAPGKEREFVASISWRGNVTYYADSVKGRFTISRDDARNTVYLQMNSLKPEDTAVYYCNVWVILSVGGIMEYWGQGTQVTVSS

SEQ ID NO: 10205 - protein, 119 aa, synthetic construct
EVQLVESGGGLVQAGDSLRLSCTASGQVHGVIEMGWFRQAPGKEREFVASISGIDIYTYYADSVKGRFTISRDDARNTVYLQMNSLKPEDTAVYYCNVTAIALGFNEYWGQGTQVTVSS

SEQ ID NO: 10206 - protein, 120 aa, synthetic construct
EVQLVESGGGLVQAGDSLRLSCTASGSDRPYIEMGWFRQAPGKEREFVASISTRASYTYYADSVKGRFTISRDDARNTVYLQMNSLKPEDTAVYYCNVVAVTSHSFGEYWGQGTQVTVSS

SEQ ID NO: 10207 - protein, 124 aa, synthetic construct
EVQLVESGGGLVQAGDSLRLSCTASGVPSAIVEMGWFRQAPGKEREFVASISGQTMYTYYADSVKGRFTISRDDARNTVYLQMNSLKPEDTAVYYCNVTSINVCSKFIKFREYWGQGTQVTVSS

SEQ ID NO: 10208 - protein, 117 aa, synthetic construct
EVQLVESGGGLVQAGDSLRLSCTASGQVFDSNWMGWFRQAPGKEREFVASISGIFMVTYYADSVKGRFTISRDDARNTVYLQMNSLKPEDTAVYYCNSISQWSKEYWGQGTQVTVSS

SEQ ID NO: 10209 - protein, 117 aa, synthetic construct
EVQLVESGGGLVQAGDSLRLSCTASGRVGNVMEMGWFRQAPGKEREFVASISGKNHGTYYADSVKGRFTISRDDARNTVYLQMNSLKPEDTAVYYCNVFTMLLLEYWGQGTQVTVSS

SEQ ID NO: 10210 - protein, 120 aa, synthetic construct
EVQLVESGGGLVQAGDSLRLSCTASGFRQVFLGMGWFRQAPGKEREFVASISGFGEVTYYADSVKGRFTISRDDARNTVYLQMNSLKPEDTAVYYCNVVRTITDVGIEYWGQGTQVTVSS

SEQ ID NO: 10211 - protein, 119 aa, synthetic construct
EVQLVESGGGLVQAGDSLRLSCTASGIVAYVIEMGWFRQAPGKEREFVASISGNRARTYYADSVKGRFTISRDDARNTVYLQMNSLKPEDTAVYYCNVTVIDGGFREYWGQGTQVTVSS

SEQ ID NO: 10212 - protein, 119 aa, synthetic construct
EVQLVESGGGLVQAGDSLRLSCTASGTDGNGIEMGWFRQAPGKEREFVASISVLNGITYYADSVKGRFTISRDDARNTVYLQMNSLKPEDTAVYYCNVTTFARRFVEYWGQGTQVTVSS

SEQ ID NO: 10213 - protein, 120 aa, synthetic construct
EVQLVESGGGLVQAGDSLRLSCTASGVPGVHIEMGWFRQAPGKEREFVASISGIGTYTYYADSVKGRFTISRDDARNTVYLQMNSLKPEDTAVYYCNVATLHSHDFMEYWGQGTQVTVSS

SEQ ID NO: 10214 - protein, 120 aa, synthetic construct
EVQLVESGGGLVQAGDSLRLSCTASGSISGALEMGWFRQAPGKEREFVASISWGVHYTYYADSVKGRFTISRDDARNTVYLQMNSLKPEDTAVYYCNVIFFTRGGFDEYWGQGTQVTVSS

SEQ ID NO: 10215 - protein, 117 aa, synthetic construct
EVQLVESGGGLVQAGDSLRLSCTASGMGADVLEMGWFRQAPGKEREFVASISAMRDYTYYADSVKGRFTISRDDARNTVYLQMNSLKPEDTAVYYCNVVSIRFMEYWGQGTQVTVSS

SEQ ID NO: 10216 - protein, 120 aa, synthetic construct
EVQLVESGGGLVQAGDSLRLSCTASGSPRVVLEMGWFRQAPGKEREFVASISMHTDYTYYADSVKGRFTISRDDARNTVYLQMNSLKPEDTAVYYCNVTDCVDIGFREYWGQGTQVTVSS

SEQ ID NO: 10217 - protein, 120 aa, synthetic construct
EVQLVESGGGLVQAGDSLRLSCTASGKVCDAIEMGWFRQAPGKEREFVASISGRTVDTYYADSVKGRFTISRDDARNTVYLQMNSLKPEDTAVYYCNVTSIMLGGFKEYWGQGTQVTVSS

SEQ ID NO: 10218 - protein, 121 aa, synthetic construct
EVQLVESGGGLVQAGDSLRLSCTASGDMGRGIEMGWFRQTPGKEREFVASISVHLAYTYYADSVKGRFTISRDDARNTVYLQMNSLKPEDTAVYYCNVTSISGTFAIVEYWGQGTQVTVSS

SEQ ID NO: 10219 - protein, 122 aa, synthetic construct
EVQLVESGGGLVQAGDSLRLSCTASGRSGIVMEMGWFRQAPGKEREFVASISVRNGSTYYADSVKGRFTISRDDARNTVYLQMNSLKPEDTAVYYCNVTSWTGNLCGFEEYWGQGTQVTVSS

SEQ ID NO: 10220 - protein, 117 aa, synthetic construct
EVQLVESGGGLVQAGDSLRLSCTASGEARNLMIMGWFRQAPGKEREFVASISGERAYTYYADSVKGRFTISRDDARNTVYLQMNSLKPEDTAVYYCNVVSNRIREYWGQGTQVTVSS

SEQ ID NO: 10221 - protein, 119 aa, synthetic construct
EVQLVESGGGLVQAGDSLRLSCTASGNVANVIEMGWFRQAPGKEREFVASISANCSYTYYADSVKGRFTISRDDARNTVYLQMNSLKPEDTAVYYCNVTLLVRGVREYWGQGTQVTVSS

SEQ ID NO: 10222 - protein, 117 aa, synthetic construct
EVQLVESGGGLVQAGDSLRLSCTASGRHDPVLEMGWFRQAPGKEREFVASISKAGIYTYYADSVKGRFTISRDDARNTVYLQMNSLKPEDTAVYYCNVVYVDFKEYWGQGTQVTVSS

SEQ ID NO: 10223 - protein, 121 aa, synthetic construct
EVQLVESGGGLVQAGDSLRLSCTASGGRVVMMVMGWFRQAPGKEREFVASISEPGYVTYYADSVKGRFTISRDDARNTVYLQMNSLKPEDTAVYYCNVWGVRTVVGFFEYWGQGTQVTVSS

SEQ ID NO: 10224 - protein, 120 aa, synthetic construct
EVQLVESGGGLVQAGDSLRLSCTASGAIGDLIEMGWFRQAPGKEREFVASISVVGHYTYYADSVKGRFTISRDDARNTVYLQMNSLKPEDTAVYYCNVTLLCRDGFREYWGQGTQVTVSS

SEQ ID NO: 10225 - protein, 119 aa, synthetic construct
EVQLVESGGGLVQAGDSLRLSCTASGHARYVMEMGWFRQAPGKEREFVASISGRDMSTYYADSVKGRFTISRDDARNTVYLQMNSLKPEDTAVYYCNVTMLNVRFSEYWGQGTQVTVSS

SEQ ID NO: 10226 - protein, 117 aa, synthetic construct
EVQLVESGGGLVQAGDSLRLSCTASGGPRPFVIMGWFRQAPGKEREFVASISGNRDYTYYADSVKGRFTISRDDARNTVYLQMNSLKPEDTAVYYCNVVDTRIVEYWGQGTQVTVSS

SEQ ID NO: 10227 - protein, 119 aa, synthetic construct
EVQLVESGGGLVQAGDSLRLSCTASGDRKAVIEMGWFRQAPGKEREFVASISSDGMYTYYADSVKGRFTISRDDARNTVYLQMNSLKPEDTAVYYCNVVKWSGTFVEYWGQGTQVTVSS

SEQ ID NO: 10228 - protein, 117 aa, synthetic construct
EVQLVESGGGLVQAGDSLRLSCTASGARIVFLAMGWFRQAPGKEREFVASISGFNTVTYYADSVKGRFTISRDDARNTVYLQMNSLKPEDTAVYYCNVTGLDSLEYWGQGTQVTVSS

SEQ ID NO: 10229 - protein, 120 aa, synthetic construct
EVQLVESGGGLVQAGDSLRLSCTASGSSHVPIEIGWFRQAPGKEREFVASISGEGVYTYYADSVKGRFTISRDDARNTVYLQMNSLKPEDTAVYYCNVTVLVHRFLKEYWGQGTQVTVSS

SEQ ID NO: 10230 - protein, 120 aa, synthetic construct
EVQLVESGGGLVQAGDSLRLSCTASGSGKDVLEMGWFRQAPGKEREFVASISRMGGYTYYADSVKGRFTISRDDARNTVYLQMNSLKPEDTAVYYCNVVQLVKLRFIEYWGQGTQVTVSS

SEQ ID NO: 10231 - protein, 122 aa, synthetic construct
EVQLVESGGGLVQAGDSLRLSCTASGGLSIVLEMGWFRQAPGKEREFVASISGSRGYTYYADSVKGRFTISRDDARNTVYLQMNSLKPEDTAVYYCNVTKYSPNSFCFTEYWGQGTQVTVSS

SEQ ID NO: 10232 - protein, 119 aa, synthetic construct
EVQLVESGGGLVQAGDSLRLSCTASGLRPAVIEMGWFRQAPGKEREFVASISGHAHDTYYADSVKGRFTISRDDARNTVYLQMNSLKPEDTAVYYCNVTVFVRRFVEYWGQGTQVTVSS

SEQ ID NO: 10233 - protein, 119 aa, synthetic construct
EVQLVESGGGLVQAGDSLRLSCTASGQRIVFADMGWFRQAPGKEREFVASISGFHGCTYYADSVKGRFTISRDDARNTVYLQMNSLKPEDTAVYYCNVVAREFVMDEYWGQGTQVTVSS

SEQ ID NO: 10234 - protein, 118 aa, synthetic construct
EVQLVESGGGLVQAGDSLRLSCTASGGRIVFVDMGWFRQAPGKEREFVASISGYGWHTYYADSVKGRFTISRDDARNTVYLQMNSLKPEDTAVYYCNVLGNQFQEEYWGQGTQVTVSS

SEQ ID NO: 10235 - protein, 122 aa, synthetic construct
EVQLVESGGGLVQAGDSLRLSCTASGGQGFGYHMGWFRQAPGKEREFVASISGVNDYTYYADSVKGRFTISRDDARNTVYLQMNSLKPEDTAVYYCNVDPFVLFHHRMKEYWGQGTQVTVSS

SEQ ID NO: 10236 - protein, 120 aa, synthetic construct
EVQLVESGGGLVQAGDSLRLSCTASGSGSHLIEMGWFRQAPGKEREFVASISNTDSYTYYADSVKGRFTISRDDARNTVYLQMNSLKPEDTAVYYCNVVRFVLVKFCEYWGQGTQVTVSS

SEQ ID NO: 10237 - protein, 120 aa, synthetic construct
EVQLVESGGGLVQAGDSLRLSCTASGTCGVMLEMGWFRQAPGKEREFVASISGSGWYTYYADSVKGRFTISRDDARNTVYLQMNSLKPEDTAVYYCNVTVLIGPLIREYWGQGTQVTVSS

SEQ ID NO: 10238 - protein, 120 aa, synthetic construct
EVQLVESGGGLVQAGDSLRLSCTASGSLAVVVEMGWFRQAPGKEREFVASISGNGSFTYYADSVKGRFTISRDDARNTVYLQMNSLKPEDTAVYYCNVTCITRLGFFEYWGQGTQVTVSS

SEQ ID NO: 10239 - protein, 120 aa, synthetic construct
EVQLVESGGGLVQAGDSLRLSCTASGRGVMVLEMGWFRQAPGKEREFVASISGRMDYTYYADSVKGRFTISRDDARNTVYLQMNSLKPEDTAVYYCNVTGIATHGIKEYWGQGTQVTVSS

SEQ ID NO: 10240 - protein, 118 aa, synthetic construct
EVQLVESGGGLVQAGDSLRLSCTASGDRLVFVPMGWFRQAPGKEREFVASISGFHSVTYYADSVKGRFTISRDDARNTVYLQMNSLKPEDTAVYYCNVMLAKSLIEYWGQGTQVTVSS

SEQ ID NO: 10241 - protein, 116 aa, synthetic construct
EVQLVESGGGLVQAGDSLRLSCTASGNGLMRGLMGWFRQAPGKEREFVAVTMASGFTYYADSVKGRFTISRDDARNTVYLQMNSLKPEDTAVYYCNVEGPRWEEYWGQGTQVTVSS

SEQ ID NO: 10242 - protein, 117 aa, synthetic construct
EVQLVESGGGLVQAGDSLRLSCTASGARLVFIDMGWFRQAPGKEREFVASISGFGSRTYYADSVKGRFTISRDDARNTVYLQMNSLKPEDTAVYYCNVTAVSAREYWGQGTQVTVSS

SEQ ID NO: 10243 - protein, 120 aa, synthetic construct
EVQLVESGGGLVQAGDSLRLSCTASGMRVVFLQMGWFRQAPGKEREFVASISGFGGGTYYADSVKGRFTISRDDARNTVYLQMNSLKPEDTAVYYCNVDDVQMVVNREYWGQGTQVTVSS

SEQ ID NO: 10244 - protein, 119 aa, synthetic construct
EVQLVESGGGLVQAGDSLRLSCTASGVKRGVIEMGWFRQAPGKEREFVASISGRNVYTYYADSVKGRFTISRDDARNTVYLQMNSLKPEDTAVYYCNVVLVDGGFIEYWGQGTQVTVSS

SEQ ID NO: 10245 - protein, 119 aa, synthetic construct
EVQLVESGGGLVQAGDSLRLSCTASGRSSVRYVMGWFRQAPGKEREFVASISDRFAVTYYADSVKGRFTISRDDARNTVYLQMNSLKPEDTAVYYCNVWPWWMEPTEYWGQGTQVTVSS

SEQ ID NO: 10246 - protein, 122 aa, synthetic construct
EVQLVESGGGLVQAGDSLRLSCTASGRLVFRIMGWFRQAPGKEREFVASISGFKAVTYYADSVKGRFTISRDDARNTVYLQMNSLKPEDTAVYYCNVLRVHGVENVVDTEYWGQGTQVTVSS

SEQ ID NO: 10247 - protein, 125 aa, synthetic construct
EVQLVESGGGLVQAGDSLRLSCTASGYTGVVLEMGWFRQAPGKEREFVASISGSGHYTYYADSVKGRFTISRDDARNTVYLQMNSLKPEDTAVYYCNVTGFGRTIEAFGRLDEYWGQGTQVTVSS

SEQ ID NO: 10248 - protein, 121 aa, synthetic construct
EVQLVESGGGLVQAGDSLRLSCTASGFRFVFRDMGWFRQAPGKEREFVASISGFHNVTYYADSVKGRFTISRDDARNTVYLQMNSLKPEDTAVYYCNVVACVCVLRSPEYWGQGTQVTVSS

SEQ ID NO: 10249 - protein, 122 aa, synthetic construct
EVQLVESGGGLVQAGDSLRLSCTASGNRIVFRPMGWFRQAPGKEREFVASISGFLSITYYADSVKGRFTISRDDARNTVYLQMNSLKPEDTAVYYCNVGVDTFLHEQLPEYWGQGTQVTVSS

SEQ ID NO: 10250 - protein, 120 aa, synthetic construct
EVQLVESGGGLVQAGDSLRLSCTASGNQVRMLEMGWFRQAPGKEREFVASISVRRVYTYYADSVKGRFTISRDDARNTVYLQMNSLKPEDTAVYYCNVTALVCSGFSEYWGQGTQVTVSS

SEQ ID NO: 10251 - protein, 120 aa, synthetic construct
EVQLVESGGGLVQAGDSLRLSCTASGLAFPPLEMGWFRQAPGKEREFVASISGALMYTYYADSVKGRFTISRDDARNTVYLQMNSLKPEDTAVYYCNVWIVTRFSFEEYWGQGTQVTVSS

SEQ ID NO: 10252 - protein, 120 aa, synthetic construct
EVQLVESGGGLVQAGDSLRLSCTASGAGVGVIEMGWFRQAPGKEREFVASISGRNVYTYYADSVKGRFTISRDDARNTVYLQMNSLKPEDTAVYYCNVVYVYHTRFAEYWGQGTQVTVSS

SEQ ID NO: 10253 - protein, 122 aa, synthetic construct
EVQLVESGGGLVQAGDSLRLSCTASGHRGWLVEMGWFRQAPGKEREFVASISGSTKYTYYADSVKGRFTISRDDARNTVYLQMNSLKPEDTAVYYCNVTEFDSVNPHFREYWGQGTQVTVSS

SEQ ID NO: 10254 - protein, 124 aa, synthetic construct
EVQLVESGGGLVQAGDSLRLSCTASGDIAALLEMGWFRQAPGKEREFVASISGNVAYTYYADSVKGRFTISRDDARNTVYLQMNSLKPEDTAVYYCNVTKLVQLIGFVGFVEYWGQGTQVTVSS

SEQ ID NO: 10255 - protein, 120 aa, synthetic construct
EVQLVESGGGLVQAGDSLRLSCTASGLEEVVMEMGWFRQAPGKEREFVASISGRDSRTYYADSVKGRFTISRDDARNTVYLQMNSLKPEDTAVYYCNVTSLSVVGFKEYWGQGTQVTVSS

SEQ ID NO: 10256 - protein, 122 aa, synthetic construct
EVQLVESGGGLVQAGDSLRLSCTASGGIFAALEMGWFRQAPGKEREFVASISMRENLTYYADSVKGRFTISRDDARNTVYLQMNSLKPEDTAVYYCNVTVVNRGTWTFEEYWGQGTQVTVSS

SEQ ID NO: 10257 - protein, 124 aa, synthetic construct
EVQLVESGGGLVQAGDSLRLSCTASGIRFVFRTMGWFRQAPGKEREFVASISGFGHDTYYADSVKGRFTISRDDARNTVYLQMNSLKPEDTAVYYCNVAITDAFLVDVARTEYWGQGTQVTVSS

SEQ ID NO: 10258 - protein, 117 aa, synthetic construct
EVQLVESGGGLVQAGDSLRLSCTASGTRLVFVGMGWFRQAPGKEREFVASISGFHGTTYYADSVKGRFTISRDDARNTVYLQMNSLKPEDTAVYYCNVDRRDVREYWGQGTQVTVSS

SEQ ID NO: 10259 - protein, 117 aa, synthetic construct
EVQLVESGGGLVQAGDSLRLSCTASGLRLVFRMMGWFRQAPGKEREFVASISGFGGLTYYADSVKGRFTISRDDARNTVYLQMNSLKPEDTAVYYCNVLDGSLEEYWGQGTQVTVSS

SEQ ID NO: 10260 - protein, 118 aa, synthetic construct
EVQLVESGGGLVQAGDSLRLSCTASGHRIVFREMGWFRQAPGKEREFVASISGFHQDTYYADSVKGRFTISRDDARNTVYLQMNSLKPEDTAVYYCNVSGSMTGPEYWGQGTQVTVSS

SEQ ID NO: 10261 - protein, 117 aa, synthetic construct
EVQLVESGGGLVQAGDSLRLSCTASGHRFVFIDMGWFRQAPGKEREFVASISGFGGLTYYADSVKGRFTISRDDARNTVYLQMNSLKPEDTAVYYCNVLHVAREEYWGQGTQVTVSS

SEQ ID NO: 10262 - protein, 120 aa, synthetic construct
EVQLVESGGGLVQAGDSLRLSCTASGHSERMLEMGWFRQAPGKEREFVASISDVNAYTYYADSVKGRFTISRDDARNTVYLQMNSLKPEDTAVYYCNVTVLTHMRFAEYWGQGTQVTVSS

SEQ ID NO: 10263 - protein, 122 aa, synthetic construct
EVQLVESGGGLVQAGDSLRLSCTASGGRLVFRDMGWFRQAPGKEREFVASISGFLEQTYYADSVKGRFTISRDDARNTVYLQMNSLKPEDTAVYYCNVLDNSIAVIGVDEYWGQGTQVTVSS

SEQ ID NO: 10264 - protein, 121 aa, synthetic construct
EVQLVESGGGLVQAGDSLRLSCTASGPTGVTVEMGWFRQAPGKEREFVASISGLGSYTYYADSVKGRFTISRDDARNTVYLQMNSLKPEDTAVYYCNVTSWYRGTGFREYWGQGTQVTVSS

SEQ ID NO: 10265 - protein, 119 aa, synthetic construct
EVQLVESGGGLVQAGDSLRLSCTASGVGRVVMEMGWFRQAPGKEREFVASISGSHLYTYYADSVKGRFTISRDDARNTVYLQMNSLKPEDTAVYYCNVVGFMHGFQEYWGQGTQVTVSS

SEQ ID NO: 10266 - protein, 122 aa, synthetic construct
EVQLVESGGGLVQAGDSLRLSCTASGDICDVIEMGWFRQAPGKEREFVASISGRTAYTYYADSVKGRFTISRDDARNTVYLQMNSLKPEDTAVYYCNVSAFIRRIWRLTEYWGQGTQVTVSS

SEQ ID NO: 10267 - protein, 117 aa, synthetic construct
EVQLVESGGGLVQAGDSLRLSCTASGLVGNVMEMGWFRQAPGKEREFVASISATDMYTYYADSVKGRFTISRDDARNTVYLQMNSLKPEDTAVYYCNVTSADFLEYWGQGTQVTVSS

SEQ ID NO: 10268 - protein, 121 aa, synthetic construct
EVQLVESGGGLVQAGDSLRLSCTASGGMSNHIEMGWFRQAPGKEREFVASISRRDLITYYADSVKGRFTISRDDARNTVYLQMNSLKPEDTAVYYCNVTVFNIGHGFMEYWGQGTQVTVSS

SEQ ID NO: 10269 - protein, 120 aa, synthetic construct
EVQLVESGGGLVQAGDSLRLSCTASGNEASIIEMGWFRQAPGKEREFVASISGGGDYTYYADSVKGRFTISRDDARNTVYLQMNSLKPEDTAVYYCNVSVIVGGLFVEYWGQGTQVTVSS

SEQ ID NO: 10270 - protein, 124 aa, synthetic construct
EVQLVESGGGLVQAGDSLRLSCTASGYCDRVVEMGWFRQAPGKEREFVASISGTGSYTYYADSVKGRFTISRDDARNTVYLQMNSLKPEDTAVYYCNVTLILRTLDRVGVYEYWGQGTQVTVSS

SEQ ID NO: 10271 - protein, 121 aa, synthetic construct
EVQLVESGGGLVQAGDSLRLSCTASGLASGLVEMGWFRQAPGKEREFVASISGHVVYTYYADSVKGRFTISRDDARNTVYLQMNSLKPEDTAVYYCNVTMVDSRFGFVEYWGQGTQVTVSS

SEQ ID NO: 10272 - protein, 119 aa, synthetic construct
EVQLVESGGGLVQAGDSLRLSCTASGDNNRFIEMGWFRQAPGKEREFVASISGTGVYTYYADSVKGRFTISRDDARNTVYLQMNSLKPEDTAVYYCNVSTFSGCYVEYWGQGTQVTVSS

SEQ ID NO: 10273 - protein, 119 aa, synthetic construct
EVQLVESGGGLVQAGDSLRLSCTASGLSQGVLEMGWFRQAPGKEREFVASISGVTCYTYYADSVKGRFTISRDDARNTVYLQMNSLKPEDTAVYYCNVLIVDNRIREYWGQGTQVTVSS

SEQ ID NO: 10274 - protein, 120 aa, synthetic construct
EVQLVESGGGLVQAGDSLRLSCTASGEDHVKVEMGWFRQAPGKEREFVASISARHEETYYADSVKGRFTISRDDARNTVYLQMNSLKPEDTAVYYCNVTVFDMQGFHEYWGQGTQVTVSS

SEQ ID NO: 10275 - protein, 124 aa, synthetic construct
EVQLVESGGGLVQAGDSLRLSCTASGVKDRVVEMGWFRQAPGKEREFVASISGNGTYTYYADSVKGRFTISRDDSRNTVYLQMNSLKPEDTAVYYCNVWVVIVGALGVRLSEYWGQGTQVTVSS

SEQ ID NO: 10276 - protein, 120 aa, synthetic construct
EVQLVESGGGLVQAGDSLRLSCTASGDMGRVLEMGWFRQAPGKEREFVASISGTGAYTYYADSVKGRFTISRDDARNTVYLQMNSLKPEDTAVYYCNVTRVSVGRIGEYWGQGTQVTVSS

SEQ ID NO: 10277 - protein, 120 aa, synthetic construct
EVQLVESGGGLVQAGDSLRLSCTASGIGLHIMEMGWFRQAPGKEREFVASISGSGAYTYYADSVKGRFTISRDDARNTVYLQMNSLKPEDTAVYYCNVMVFRSGAFLEYWGQGTQVTVSS

SEQ ID NO: 10278 - protein, 119 aa, synthetic construct
EVQLVESGGGLVQAGDSLRLSCTASGIVRASRIMGWFRQAPGKEREFVASIWFLATYYADSVKGRFTISRDDARNTVYLQMNSLKPEDTAVYYCNVCRNMMDIDGSEYWGQGTQVTVSS

SEQ ID NO: 10279 - protein, 121 aa, synthetic construct
EVQLVESGGGLVQAGDSLRLSCTASGVMGVTIEMGWFRQAPGKEREFVASISNSGLYTYYADSVKGRFTISRDDARNTVYLQMNSLKPEDTAVYYCNVTCCGESTGFVEYWGQGTQVTVSS

SEQ ID NO: 10280 - protein, 118 aa, synthetic construct
EVQLVESGGGLVQAGDSLRLSCTASGLSEVKGIMGWFRQAPGKEREFVASISTHGLATYYADSVKGRFTISRDDARNTVYLQMNSLKPEDTAVYYCNVLNVIPWLEYWGQGTQVTVSS

SEQ ID NO: 10281 - protein, 121 aa, synthetic construct
EVQLVESGGGLVQAGDSLRLSCTASGTHGTWMEMGWFRQAPGKEREFVASISRHLDYTYYADSVKGRFTISRDDARNTVYLQMNSLKPEDTAVYYCNVVMIVLNGMFHEYWGQGTQVTVSS

SEQ ID NO: 10282 - protein, 120 aa, synthetic construct
EVQLVESGGGLVQAGDSLRLSCTASGMCVMPLEMGWFRQAPGKEREFVASISGSRLYTYYADSVKGRFTISRDDARNTVYLQMNSLKPEDTAVYYCNVTVIVAVAFKEYWGQGTQVTVSS

SEQ ID NO: 10283 - protein, 120 aa, synthetic construct
EVQLVESGGGLVQAGDSLRLSCTASGVDGCILEMGWFRQAPGKEREFVASISGFGFYTYYADSVKGRFTISRDDARNTVYLQMNSLKPEDTAVYYCNVTGIHKKLIAEYWGQGTQVTVSS

SEQ ID NO: 10284 - protein, 120 aa, synthetic construct
EVQLVESGGGLVQAGDSLRLSCTASGHPAQFMEMGWFRQAPGKEREFVASISMRSNYTYYADSVKGRFTISRDDARNTVYLQMNSLKPEDTAVYYCNVVTFVDNRFVEYWGQGTQVTVSS

SEQ ID NO: 10285 - protein, 120 aa, synthetic construct
EVQLVESGGGLVQAGDSLRLSCTASGLSDKAIEMGWFRQAPGKEREFVASISVTDRYTYYADSVKGRFTISRDDARNTVYLQMNSLKPEDTAVYYCNVTTLKVVGFVEYWGQGTQVTVSS

SEQ ID NO: 10286 - protein, 120 aa, synthetic construct
EVQLVESGGGLVQAGDSLRLSCTASGRRDCALEMGWFRQAPGKEREFVASISRTALGTYYADSVKGRFTISRDDARNTVYLQMNSLKPEDTAVYYCNVTVFTGRGFVEYWGQGTQVTVSS

SEQ ID NO: 10287 - protein, 120 aa, synthetic construct
EVQLVESGGGLVQAGDSLRLSCTASGHINTVMEMGWFRQAPGKEREFVASISGRNLNTYYADSVKGRFTISRDDARNTVYLQMNSLKPEDTAVYYCNVTMYGDHRFLEYWGQGTQVTVSS

SEQ ID NO: 10288 - protein, 125 aa, synthetic construct
EVQLVESGGGLVQAGDSLRLSCTASGKRIVFVEMGWFRQAPGKEREFVASISGFNEVTYYADSVKGRFTISRDDARNTVYLQMNSLKPEDTAVYYCNVMRVAGDVEALRNSGEYWGQGTQVTVSS

SEQ ID NO: 10289 - protein, 120 aa, synthetic construct
EVQLVESGGGLVQAGDSLRLSCTASGIVSTPIEMGWFRQAPGKEREFVASISGIGEYTYYADSVKGRFTISRDDARNTVYLQMNSLKPEDTAVYYCNVVVHNGGWFIEYWGQGTQVTVSS

SEQ ID NO: 10290 - protein, 121 aa, synthetic construct
EVQLVESGGGLVQAGDSLRLSCTASGWMEGVLEMGWFRQAPGKEREFVASISGSRIYTYYADSVKGRFTISRDDARNTVYLQMNSLKPEDTAVYYCNVVAVVKKVGFIEYWGQGTQVTVSS

SEQ ID NO: 10291 - protein, 118 aa, synthetic construct
EVQLVESGGGLVQAGDSLRLSCTASGWRLVFSGMGWFRQAPGKEREFVASISGFNSVTYYADSVKGRFTISRDDARNTVYLQMNSLKPEDTAVYYCNVVGTVIEVEYWGQGTQVTVSS

SEQ ID NO: 10292 - protein, 119 aa, synthetic construct
EVQLVESGGGLVQAGDSLRLSCTASGNAHQVVEMGWFRQAPGKEREFVASISGIYHGTYYADSVKGRFTISRDDARNTVYLQMNSLKPEDTAVYYCNVTVIDGRFREYWGQGTQVTVSS

SEQ ID NO: 10293 - protein, 120 aa, synthetic construct
EVQLVESGGGLVQAGDSLRLSCTASGVRIVFRRMGWFRQAPGKEREFVASISGFGQETYYADSVKGRFTISRDDARNTVYLQMNSLKPEDTAVYYCNVGQDCIADVSEYWGQGTQVTVSS

SEQ ID NO: 10294 - protein, 120 aa, synthetic construct
EVQLVESGGGLVQAGDSLRLSCTASGSGGPVLEMGWFRQAPGKEREFVASISGLSDYTYYADSVKGRFTISRDDARNTVYLQMNSLKPEDTAVYYCNVVRWVQKFFQEYWGQGTQVTVSS

SEQ ID NO: 10295 - protein, 120 aa, synthetic construct
EVQLVESGGGLVQAGDSLRLSCTASGGLERVLEMGWFRQAPGKEREFVASISGMGTYTYYADSVKGRFTISRDDARNTVYLQMNSLKPEDTAVYYCNVTSCNGGRLAEYWGQGTQVTVSS

SEQ ID NO: 10296 - protein, 120 aa, synthetic construct
EVQLVESGGGLVQAGDSLRLSCTASGVAETAIEMGWFRQAPGKEREFVASISVAQGGTYYADSVKGRFTISRDDARNTVYLQMNSLKPEDTAVYYCNVTAVAERRFREYWGQGTQVTVSS

SEQ ID NO: 10297 - protein, 121 aa, synthetic construct
EVQLVESGGGLVQAGDSLRLSCTASGRDRCHIEMGWFRQAPGKEREFVASISCGADYTYYADSVKGRFTISRDDARNTVYLQMNSLKPEDTAVYYCNVTGLGNDFVFKEYWGQGTQVTVSS

SEQ ID NO: 10298 - protein, 120 aa, synthetic construct
EVQLVESGGGLVQAGDSLRLSCTASGMGVSIVEMGWFRQAPGKEREFVASISGTRDYTYYADSVKGRFTISRDDARNTVYLQMNSLKPEDTAVYYCNVVMIRLNRFNEYWGQGTQVTVSS

SEQ ID NO: 10299 - protein, 120 aa, synthetic construct
EVQLVESGGGLVQAGDSLRLSCTASGMRHVFVDMGWFRQAPGKEREFVASISGFGSSTYYADSVKGRFTISRDDARNTVYLQMNSLKPEDTAVYYCNVMQLLQDLNGEYWGQGTQVTVSS

SEQ ID NO: 10300 - protein, 124 aa, synthetic construct
EVQLVESGGGLVQAGDSLRLSCTASGGAQGFAYMGWFRQAPGKEREFVASISNVGAWTYYADSVKGRFTISRDDARNTVYLQMNSLKPEDTAVYYCNVEAVRFLIGTFVITEYWGQGTQVTVSS

SEQ ID NO: 10301 - protein, 120 aa, synthetic construct
EVQLVESGGGLVQAGDSLRLSCTASGCAGFMLEMGWFRQAPGKEREFVASISCRSNYTYYADSVKGRFTISRDDARNTVYLQMNSLKPEDTAVYYCNVTGFECFVISEYWGQGTQVTVSS

SEQ ID NO: 10302 - protein, 121 aa, synthetic construct
EVQLVESGGGLVQAGDSLRLSCTASGVAGIMLEMGWFRQAPGKEREFVASISSVHGTTYYADSVKGRFTISRDDARNTVYLQMNSLKPEDTAVYYCNVTVIQHPIRFAEYWGQGTQVTVSS

SEQ ID NO: 10303 - protein, 121 aa, synthetic construct
EVQLVESGGGLVQAGDSLRLSCTASGEGARVLEMGWFRQAPGKEREFVASISGNGNYTYYADSVKGRFTISRDDARNTVYLQMNSLKPEDTAVYYCNVVCLDYYWRFAEYWGQGTQVTVSS

SEQ ID NO: 10304 - protein, 119 aa, synthetic construct
EVQLVESGGGLVQAGDSLRLSCTASGSRVVFSDMGWFRQAPGKEREFVASISGFGGVTYYADSVKGRFTISRDDARNTVYLQMNSLKPEDTAVYYCNVLRTVMCRTEYWGQGTQVTVSS

SEQ ID NO: 10305 - protein, 120 aa, synthetic construct
EVQLVESGGGLVQAGDSLRLSCTASGNANRVLEMGWFRQAPGKEREFVASISFSSASTYYADSVKGRFTISRDDARNTVYLQMNSLKPEDTAVYYCNVTGFTGVQFIEYWGQGTQVTVSS

SEQ ID NO: 10306 - protein, 114 aa, synthetic construct
EVQLVESGGGLVQAGDSLRLSCTASGTIDYLRPMGWFRQAPGKEREFVAIEFGAETYYADSVKGRFTISRDDARNTVYLQMNSLKPEDTAVYYCERRTAVAEYWGQGTQVTVSS

SEQ ID NO: 10307 - protein, 121 aa, synthetic construct
EVQLVESGGGLVQAGDSLRLSCTASGTPSGSLEMGWFRQAPGKEREFVASISSNVRMTYYADSVKGRFTISRDDARNTVYLQMNSLKPEDTAVYLQRMTCYSYVTGFIEYWGQGTQVTVSS

SEQ ID NO: 10308 - protein, 120 aa, synthetic construct
EVQLVESGGGLVQAGDSLRLSCTASGRTGTVVEMGWFRQAPGKEREFVASISGCGWYTYYADSVKGRFTISRDDARNTVYLQMNSLKPEDTAVYYCNVTTWDFAGCLEYWGQGTQVTVSS

SEQ ID NO: 10309 - protein, 120 aa, synthetic construct
EVQLVESGGGLVQAGDSLRLSCTASGGCVMLMEMGWFRQAPGKEREFVASISCVSDYTYYADSVKGRFTISRDDARNTVYLQMNSLKPEDTAVYYCNVMGIMTSRLVEYWGQGTQVTVSS

SEQ ID NO: 10310 - protein, 119 aa, synthetic construct
EVQLVESGGGLVQAGDSLRLSCTASGDVPLVIEMGWFRQAPGKEREFVASISNSGCYTYYADSAKGRFTISRDDARNTVYLQMNSLKPEDTAVYYCNVSCWSTVKREYWGQGTQVTVSS

SEQ ID NO: 10311 - protein, 124 aa, synthetic construct
EVQLVESGGGLVQAGDSLRLSCTASGGRIVFLMMGWFRQAPGKEREFVASISGFGLMTYYADSVKGRFTISRDDARNTVYLQMNSLKPEDTAVYYCNVDRSDLHESCSEKFEYWGQGTQVTVSS

SEQ ID NO: 10312 - protein, 116 aa, synthetic construct
EVQLVESGGGLVQAGDSLRLSCTASGYNGPVTWMGWFRQAPGKEREFVASSFARWTYYADSVKGRFTISRDDARNTVYLQMNSLKPEDTAVYYCNVISVREEMEYWGQGTQVTVSS

SEQ ID NO: 10313 - protein, 120 aa, synthetic construct
EVQLVESGGGLVQAGDSLRLSCTASGVVTNMIEMGWFRQAPGKEREFVASISCVEDYTYYADSVKGRFTISRDDARNTVYLQMNSLKPEDTAVYYCNVVGLAAKGFEEYWGQGTQVTVSS

SEQ ID NO: 10314 - protein, 120 aa, synthetic construct
EVQLVESGGGLVQAGDSLRLSCTASGILGMVMEMGWFRQAPGKEREFVASISKWECYTYYADSVKGRFTISRDDARNTVYLQMNSLKPEDTAVYYCNVTAFGSDGRTEYWGQGTQVTVSS

SEQ ID NO: 10315 - protein, 120 aa, synthetic construct
EVQLVESGGGLVQAGDSLRLSCTASGVKGTCIEMGWFRQAPGKEREFVASISVRDSGTYYADSVKGRFTISRDDARNTVYLQMNSLKPEDTAVYYCNVTVWARIGFEEYWGQGTQVTVSS

SEQ ID NO: 10316 - protein, 117 aa, synthetic construct
EVQLVESGGGLVQAGDSLRLSCTASGGRIVFMGMGWFRQAPGKEREFVASISGFGSATYYADSVKGRFTISRDDARNTVYLQMNSLKPEDTAVYYCNVNGLHIGEYWGQGTQVTVSS

SEQ ID NO: 10317 - protein, 120 aa, synthetic construct
EVQLVESGGGLVQAGDSLRLSCTASGMLSGALEMGWFRQAPGKEREFVASISAKGHGTYYADSVKGRFTISRDDARNTVYLQMNSLKPEDTAVYYCNVTCLNNQSFREYWGQGTQVTVSS

SEQ ID NO: 10318 - protein, 120 aa, synthetic construct
EVQLVESGGGLVQAGDSLRLSCTASGRRIVFIAMGWFRQAPGKEREFVARISGFRSTTYYADSVKGRFTISRDDARNTVYLQMNSLKPEDNAVYYCNVLDGVANDNTEYWGQGTQVTVSS

SEQ ID NO: 10319 - protein, 123 aa, synthetic construct
EVQLVESGGGLVQAGDSLRLSCTASGNRIVFHDMGWFRQAPGKEREFVASISWTWDVTYYADSVKGRFTISRDDARNTVYLQMNSLKPEDTAVYYCNVLRLVSVLSRTANEYWGQGTQVTVSS

SEQ ID NO: 10320 - protein, 119 aa, synthetic construct
EVQLVESGGGLVQAGDSLRLSCTASGKGKPVVEMGWFRQAPGKEREFVASISAQVRYTYYADSVKGRFTISRDDARNTVYLQMNSLKPEDTAVYYCNVTTWHNGFHEYWGQGTQVTVSS

SEQ ID NO: 10321 - protein, 111 aa, synthetic construct
EVQLVESGGGLVQAGDSLRLSCTASGNAMTRSSMGWFRQAPGKEREFVAVIIPTLGTYYADSVKGRFTISRDDARNTVYLQMNSLKPEDTAVYYCNVREYWGQGTQVTVSS

SEQ ID NO: 10322 - protein, 120 aa, synthetic construct
EVQLVESGGGLVQAGDSLRLSCTASGLAGPVLEMGWFRQAPGKEREFVASISGAGTYTYYADSVKGRFTISRDDARNTVYLQMNSLKPEDTAVYYCNVLVVHVLMIREYWGQGTQVTVSS

SEQ ID NO: 10323 - protein, 117 aa, synthetic construct
EVQLVESGGGLVQAGDSLRLSCTASGLRFVFVDMGWFRQAPGKEREFVASISGFQGRTYYADSVKGRFTISRDDARNTVYLQMNSLKPEDTAVYYCNVAADRQIEYWGQGTQVTVSS

SEQ ID NO: 10324 - protein, 121 aa, synthetic construct
EVQLVESGGGLVQAGDSLRLSCTASGRRIVFSAMGWFRQAPGKEREFVASISGYHGETYYADSVKGRFTISRDDARNTVYLQMNSLKPEDTAVYYCNVVPDDMADRVLEYWGQGTQVTVSS

SEQ ID NO: 10325 - protein, 120 aa, synthetic construct
EVQLVESGGGLVQAGDSLRLSCTASGIMAMILEMGWFRQAPGKEREFVASISRSRDYTYYADSVKGRFTISRDDARNTVYLQMNSLKPEDTAVYYCNVMGISRMTVVEYWGQGTQVTVSS

SEQ ID NO: 10326 - protein, 114 aa, synthetic construct
EVQLVESGGGLVQAGDSLRLSCTASGYRLVFNGMGWFRQAPGKEREFVASISAFGGETYYADSVKGRFTISRDDARNTVYLQMNSLKPEDTAVYYCNVSTSEYWGQGTQVTVSS

SEQ ID NO: 10327 - protein, 118 aa, synthetic construct
EVQLVESGGGLVQAGDSLRLSCTASGVFHDWFRMGWFRQAPGKEREFVASISTSGVSTYYADSVKGRFTISRDDARNTVYLQMNSLKPEDTAVYYCNVLTIWGWDEYWGQGTQVTVSS

SEQ ID NO: 10328 - protein, 119 aa, synthetic construct
EVQLVESGGGLVQAGDSLRLSCTASGDGAIEMGWFRQAPGKEREFVASISGRGLYTYYADSVKGRFTISRDDARNTVYLQMNSLKPEDTAVYYCNVTVFVVALGIHEYWGQGTQVTVSS

SEQ ID NO: 10329 - protein, 120 aa, synthetic construct
EVQLVESGGGLVQAGDSLRLSCTASGKVGVVVEMGWFRQAPGKEREFVASISGTSAGTYYADSVKGRFTISRDDARNTVYLQMNSLKPEDTAVYYCNVTKWQACTFTEYWGQGTQVTVSS

SEQ ID NO: 10330 - protein, 120 aa, synthetic construct
EVQLVESGGGLVQAGDSLRLSCTASGTRCNVIEMGWFRQAPGKEREFVASISGYGGYTYYADSVKGRFTISRDDARNTVYLQMNSLKPEDTAVYYCNVTGLFDNVIIEYWGQGTQVTVSS

SEQ ID NO: 10331 - protein, 119 aa, synthetic construct
EVQLVESGGGLVQAGDSLRLSCTASGVRFVFRTMGWFRQAPGKEREFVASISGYHGMTYYADSVKGRFTISRDDARNTVYLQMNSLKPEDTAVYYCNVGGAVPDIREYWGQGTQVTVSS

SEQ ID NO: 10332 - protein, 120 aa, synthetic construct
EVQLVESGGGLVQAGDSLRLSCTASGHHDTVLEMGWFRQAPGKEREFVASISGSGIYTYYADSVKGRFTISRDDARNTVYLQMNSLKPEDTAVYYCNVTVLSNDGLKEYWGQGTQVTVSS

SEQ ID NO: 10333 - protein, 120 aa, synthetic construct
EVQLVESGGGLVQAGDSLRLSCTASGQVHAVLEMGWFRQAPGKEREFVASISGVHWGTYYADSVKGRFTISRDDARNTVYLQMNSLKPEDTAVYYCNVTAVVRIGFREYWGQGTQVTVSS

SEQ ID NO: 10334 - protein, 120 aa, synthetic construct
EVQLVESGGGLVQAGDSLRLSCTASGRLNHVLEMGWFRQAPGKEREFVASISGSTLYTYYADSVKGRFTISRDDARNTVYLQMNSLKPEDTAVYYCNVSHIAHFRPVEYWGQGTQVTVSS

SEQ ID NO: 10335 - protein, 120 aa, synthetic construct
EVQLVESGGGLVQAGDSLRLSCTASGLVPDIIEMGWFRQAPGKEREFVASISYGLRYTYYADSVKGRFTISRDDARNTVYLQMNSLKPEDTAVYYCNVTRFGGIRFVEYWGQGTQVTVSS

SEQ ID NO: 10336 - protein, 121 aa, synthetic construct
EVQLVESGGGLVQAGDSLRLSCTASGSWFWLIEMGWFRQAPGKEREFVASISGSGLYTYYADSVKGRFTISRDDARNTVYLQMNSLKPEDTAVYYCNVAILTGMKSMVEYWGQGTQVTVSS

SEQ ID NO: 10337 - protein, 119 aa, synthetic construct
EVQLVESGGGLVQAGDSLRLSCTASGNHVIVIEMGWFRQAPGKEREFVASISGSRYATYYADSVKGRFTISRDDARNTVYLQMNSLKPEDTAVYYCNVTFFDGGFVEYWGQGTQVTVSS

SEQ ID NO: 10338 - protein, 119 aa, synthetic construct
EVQLVESGGGLVQAGDSLRLSCTASGVLFVFRAMGWFRQAPGKEREFVASISGFWNETYYADSVKGRFTISRDDARNTVYLQMNSLKPEDTAVYYCNVYHLDMGVMEYWGQGTQVTVSS

SEQ ID NO: 10339 - protein, 122 aa, synthetic construct
EVQLVESGGGLVQAGDSLRLSCTASGFRQVFLGMGWFRQAPGKEREFVASISGFGEVTYYADSVKGRFTISRDDARNTVYLQMNSLKPEDTAVYYCNVQDVRRATGRVAEYWGQGTQVTVSS

SEQ ID NO: 10340 - protein, 120 aa, synthetic construct
EVQLVESGGGLVQAGDSLRLSCTASGTGNRLMEMGWFRQAPGKEREFVASISMFSAYTYYADSVKGRFTISRDDARNTVYLQMNSLKPEDTAVYYCNVLTVCNDGFVEYWGQGTQVTVSS

SEQ ID NO: 10341 - protein, 117 aa, synthetic construct
EVQLVESGGGLVQAGDSLRLSCTASGGSNTIAKMGWFRQAPGKEREFVASISGVRTTTYYADSVKGRFTISRDDARNTVYLQMNSLKPEDTAVYYCNVLSLRAREYWGQGTQVTVSS

SEQ ID NO: 10342 - protein, 120 aa, synthetic construct
EVQLVESGGGLVQAGDSLRLSCTASGDIVHVIEMGWFRQAPGKEREFVASISQAGHYTYYADSVKGRFTISRDDARNTVYLQMNSLKPEDTAVYYCNVTAMGTTAFSEYWGQGTQVTVSS

SEQ ID NO: 10343 - protein, 120 aa, synthetic construct
EVQLVESGGGLVQAGDSLRLSCTASGLTVGVLEMGWFRQAPGKEREFVASISTRVDYTYYADSVKGRFTISRDDARNTVYLQMNSLKPEDTAVYYCNVTILGRMGVVEYWGQGTQVTVSS

SEQ ID NO: 10344 - protein, 120 aa, synthetic construct
EVQLVESGGGLVQAGDSLRLSCTAIGTIVAVVEMGWFRQAPGKEREFVASISGRTLDTYYADSVKGRFTISRDDARNTVYLQMNSLKPEDTAVYYCNVTAVMKGGFLEYWGQGTQVTVSS

SEQ ID NO: 10345 - protein, 120 aa, synthetic construct
EVQLVESGGGLVQAGDSLRLSCTASGAAGLVVEMGWFRQAPGKEREFVASISGCRVDTYYADSVKGRFTISRDDARNTVYLQMNSLKPEDTAVYYCNVTSIDRGSFTEYWGQGTQVTVSS

SEQ ID NO: 10346 - protein, 120 aa, synthetic construct
EVQLVESGGGLVQAGDSLRLSCTASGIADGLIEMGWFRQAPGKEREFVASISGQCMFTYYADSVKGRFTISRDDARNTVYLQMNSLKPEDTAVYYCNVTALVMLHFVEYWGQGTQVTVSS

SEQ ID NO: 10347 - protein, 122 aa, synthetic construct
EVQLVESGGGLVQAGDSLRLSCTASGSSGEVLEMGWFRQAPGKEREFVASISGARQYTYYADSVKGRFTISRDDARNTVYLQMNSLKPEDTAVYYCNVSHWCNARPAFYEYWGQGTQVTVSS

SEQ ID NO: 10348 - protein, 118 aa, synthetic construct
EVQLVESGGGLVQAGDSLRLSCTASGSVDVTSVMGWFRQAPGKEREFVASISGLRLITYYADSVKGRFTISRDDARNTVYLQMNSLKPEDTAVYYCNVLVLQTWTEYWGQGTQVTVSS

SEQ ID NO: 10349 - protein, 125 aa, synthetic construct
EVQLVESGGGLVQAGDSLRLSCTASGNRIVFVTMGWFRQAPGKEREFVASISGFHTETYYADSVKGRFTISRDDARNTVYLQMNSLKPEDTAVYYCNVQPGVDVGFDELRIQEYWGQGTQVTVSS

SEQ ID NO: 10350 - protein, 119 aa, synthetic construct
EVQLVESGGGLVQAGDSLRLSCTASGNVNYLLEMGWFRQAPGKEREFVASISGFDVYTYYADSVKGRFTISRDDARNTVYLQMNSLKPEDTAVYYCNVTSWSGRFFEYWGQGTQVTVSS

SEQ ID NO: 10351 - protein, 121 aa, synthetic construct
EVQLVESGGGLVQAGDSLRLSCTASGIGWTVWFMGWFRQAPGKEREFVASISGGFWVTYYADSVKGRFTISRDDARNTVYLQMNSLKPEDTAVYYCNVWGVTGKALFEEYWGQGTQVTVSS

SEQ ID NO: 10352 - protein, 125 aa, synthetic construct
EVQLVESGGGLVQAGDSLRLSCTASGGRIVFRRMGWFRQAPGKEREFVASISGFGGDTYYADSVKGRFTISRDDARNTVYLQMNSLKPEDTAVYYCNVHVLQIPGSIEVPKYEYWGQGTQVTVSS

SEQ ID NO: 10353 - protein, 120 aa, synthetic construct
EVQLVESGGGLVQAGDSLRLSCTASGSHVEVMEMGWFRQAPGKEREFVASISGRLEYTYYADSVKGRFTISRDDARNTVYLQMNSLKPEDTAVYYCNVTVLSLGGFGEYWGQGTQVTVSS

SEQ ID NO: 10354 - protein, 119 aa, synthetic construct
EVQLVESGGGLVQAGDSLRLSCTASGKRIVFIHMGWFRQAPGKEREFVASISGFRGDTYYADSVKGRFTISRDDARNTVYLQMNSLKPEDTAVYYCNVNDRDLMVDEYWGQGTQVTVSS

SEQ ID NO: 10355 - protein, 120 aa, synthetic construct
EVQLVESGGGLVQAGDSLRLSCTASGNATTLVEMGWFRQAPGKEREFVASISGQGVYTYYADSVKGRFTISRDDVRNTVYLQMNSLKPEDTAVYYCNVVVWMAKTFLEYWGQGTQVTVSS

SEQ ID NO: 10356 - protein, 115 aa, synthetic construct
EVQLVESGGGLVQAGDSLRLSCTASGNNMMEMGWFRQAPGKEREFVASISVRTNGTYYADSVKGRFTISRDDARNTVYLQMNSLKPEDTAVYYCNVTSTFFVEYWGQGTQVTVSS

SEQ ID NO: 10357 - protein, 120 aa, synthetic construct
EVQLVESGGGLVQAGDSLRLSCTASGLIGSAIEMGWFRQAPGKEREFVASISVRSIDTYYADSVKGRFTISRDDARNTVYLQMNSLKPEDTAVYYCNVTTFMITGFLEYWGQGTQVTVSS

SEQ ID NO: 10358 - protein, 122 aa, synthetic construct
EVQLVESGGGLVQAGDSLRLSCTASGSKEGRIDMGWFRQAPGKEREFVASISVQGFMTYYADSVKGRFTISRDDARNTVYLQMNSLKPEDTAVYYCNVTSFHVGLWKFVEYWGQGTQVTVSS

SEQ ID NO: 10359 - protein, 121 aa, synthetic construct
EVQLVESGGGLVQAGDSLRLSCTASGSYDIGARMGWFRQAPGKEREFVASISDVAGITYYADSVKGRFTISRDDARNTVYLQMNSLKPEDTAVYYCNVIMVRVSIVFAEYWGQGTQVTVSS

SEQ ID NO: 10360 - protein, 120 aa, synthetic construct
EVQLVESGGGLVQAGDSLRLSCTASGMGMVTMEMGWFRQAPGKEREFVASISGFRCYTYYADSVKGRFTISRDDARNTVYLQMNSLKPEDTAVYYCNVTCLTDTGFAEYWGQGTQVTVSS

SEQ ID NO: 10361 - protein, 116 aa, synthetic construct
EVQLVESGGGLVQAGDSLRLSCTASGKKLEFIEMGWFRQAPGKEREFVASIGYNQYTYYADSVKGRFTISRDDARNTVYLQMNSLKPEDTAVYYCNVTGLTFQEYWGQGTQVTVSS

SEQ ID NO: 10362 - protein, 119 aa, synthetic construct
EVQLVESGGGLVQAGDSLRLSCTASGAGVLEMGWFRQAPGKEREFVASISGGVHMTYYADSVKGRFTISRDDARNTVYLQMNSLKPEDTAVYYCNVTYFVISAGFTEYWGQGTQVTVSS

SEQ ID NO: 10363 - protein, 119 aa, synthetic construct
EVQLVESGGGLVQAGDSLRLSCTASGNEALVVEMGWFRQAPGKEREFVASISGHSAYTYYADSVKGRFTISRDDARNTVYLQMNSLKPEDTAVYYCNVTAWDLVKLEYWGQGTQVTVSS

SEQ ID NO: 10364 - protein, 120 aa, synthetic construct
EVQLVESGGGLVQAGDSLRLSCTASGNMAVLVEMGWFRQAPGKEREFVASISGHGSYTYYADSVKGRFTISRDDARNTVYLQMNSLKPEDTAVYYCNVTVMSSRGVGEYWGQGTQVTVSS

SEQ ID NO: 10365 - protein, 120 aa, synthetic construct
EVQLVESGGGLVQAGDSLRLSCTASGLYRSYLEMGWFRQAPGKEREFVASISRHNVYTYYADSVKGRFTISRDDARNTVYLQMNSLKPEDTAVYYCNVTAVEKGIFQEYWGQGTQVTVSS

SEQ ID NO: 10366 - protein, 120 aa, synthetic construct
EVQLVESGGGLVQAGDSLRLSCTASGNRGLRVEMGWFRQAPGKEREFVASISGIGNYTYYADSVKGRFTISRDDARNTVYLQMNSLKPEDTAVYYCNVTYVGVAGIEEYWGQGTQVTVSS

SEQ ID NO: 10367 - protein, 120 aa, synthetic construct
EVQLVESGGGLVQAGDSLRLSCTASGHSGLTLEMGWFRQAPGKEREFVASISGIGWATYYADSVKGRFTISRDDARNTVYLQMNSLKPEDTAVYYCNVTNFVLGGFVEYWGQGTQVTVSS

SEQ ID NO: 10368 - protein, 120 aa, synthetic construct
EVQLVESGGGLVQAGDSLRLSCTASGSYERLVEMGWFRQAPGKEREFVASISGRNNGTYYTDSVKGRFTISRDDARNTVYLQMNSLKPEDTAVYYCNVTIMALVMFEEYWGQGTQVTVSS

SEQ ID NO: 10369 - protein, 121 aa, synthetic construct
EVQLVESGGGLVQAGDSLRLSCTASGVRGGLVEMGWFRQAPGKEREFVASISAREAYTYYADSVKGRFTISRDDARNTVYLQMNSLKPEDTAVYYCNVTVILAIVSFVEYWGQGTQVTVSS

SEQ ID NO: 10370 - protein, 120 aa, synthetic construct
EVQLVESGGGLVQAGDSLRLSCTASGAGGKRIEMGWFRQAPGKEREFVASISGIDNNTYYADSVKGRFTISRDDARNTVYLQMNSLKPEDTAVYYCNVTCVRQSRFWEYWGQGTQVTVSS

SEQ ID NO: 10371 - protein, 121 aa, synthetic construct
EVQLVESGGGLVQAGDSLRLSCTASGVNGYVVDMGWFRQAPGKEREFVASISSARKDTYYADSVKGRFTISRDDARNTVYLQMNSLKPEDTAVYYCNVTALGGDMFFHEYWGQGTQVTVSS

SEQ ID NO: 10372 - protein, 120 aa, synthetic construct
EVQLVESGGGLVQAGDSLRLSCTASGMRGSVVEMGWFRQAPGKEREFVASISYGMNYTYYADSVKGRFTISRDDARNTVYLQMNSLKPEDTAVYYCNVVSVRIAGFVEYWGQGTQVTVSS

SEQ ID NO: 10373 - protein, 122 aa, synthetic construct
EVQLVESGGGLVQAGDSLRLSCTASGVRALIMEMGWFRQAPGKEREFVASISGSTSYTYYADSVKGRFTISRDDARNTVYLQMNSLKPEDTAVYYCNVTSWNSDFNGAREYWGQGTQVTVSS

SEQ ID NO: 10374 - protein, 119 aa, synthetic construct
EVQLVESGGGLVQAGDSLRLSCTASGLMDGMMEMGWFRQAPGKEREFVASISVRHLMTYYADSVKGRFTISRDDARNTVYLQMNSLKPEDTAVYYCNVTGFDGIFHEYWGQGTQVTVSS

SEQ ID NO: 10375 - protein, 121 aa, synthetic construct
EVQLVESGGGLVQAGDSLRLSCTASGNESCWLEMGWFRQAPGKEREFVASISGTSLYTYYADSVKGRFTVSRDDARNTVYLQMNSLKPEDTAVYYCNVTGVNVIYRLVEYWGQGTQVTVSS

SEQ ID NO: 10376 - protein, 125 aa, synthetic construct
EVQLVESGGGLVQAGDSLRLSCTASGPSSEVMEMGWFRQAPGKEREFVASISGHSVYTYYADSVKGRFTISRDDARNTVYLQMNSLKPEDTAVYYCNVTKFVMRTSLSGRVLEYWGQGTQVTVSS

SEQ ID NO: 10377 - protein, 120 aa, synthetic construct
EVQLVESGGGLVQAGDSLRLSCTASGRLELMLEMGWFRQAPGKEREFVASISGFQFNTYYADSVKGRFTISRDDARNTVYLQMNSLKPEDTAVYYCNVTIVRSHKFFEYWGQGTQVTVSS

SEQ ID NO: 10378 - protein, 112 aa, synthetic construct
EVQLVESGGGLVQAGDSLRLSCTASGVALSSVIMGWFRQAPGKEREFVAISGCALWTYYADSVKGRFTISRDDARNTVYLQMNSLKPEDTAVYYCNVDSEYWGQGTQVTVSS

SEQ ID NO: 10379 - protein, 117 aa, synthetic construct
EVQLVESGGGLVQAGDSLRLSCTASGNREFLLEMGWFRQAPGKEREFVASISVRDGYTYYADSVKGRFTISRDDARNTVYLQMNSLKPEDTAVYYCNVTGMNFGKYWGQGTQVTVSS

SEQ ID NO: 10380 - protein, 117 aa, synthetic construct
EVQLVESGGGLVQAGDSLRLSCTASGLKDFVMEMGWFRQAPGKEREFVASISDHGSYTYYADSVKGRFTISRDDARNTVYLQMNSLKPEDTAVYYCNVTTTGFHEYWGQGTQVTVSS

SEQ ID NO: 10381 - protein, 119 aa, synthetic construct
EVQLVESGGGLVQAGDSLRLSCTASGVRGNVIEMGWFRQAPGKEREFVASISQRERATYYADSVKGRFTISRDDARNTVYLQMNSLKPEDTAVYYCNVTVLVKRFAEYWGQGTQVTVSS

SEQ ID NO: 10382 - protein, 121 aa, synthetic construct
EVQLVESGGGLVQAGDSLRLSCTASGRRVIPRFMGWFRQAPGKEREFVASISMPGEHTYYADSVKGRFTISRDDARNTVYLQMNSLKPEDTAVYYCNVLTIDVDFLIREYWGQGTQVTVSS

SEQ ID NO: 10383 - protein, 120 aa, synthetic construct
EVQLVESGGGLVQAGDSLRLSCTASGGCTRVIDMGWFRQAPGKEREFVASISGVETYTYYADSVKGRFTISRDDARNTVYLQMNSLKPEDTAVYYCNVTVLSQSGFREYWGQGTQVTVSS

SEQ ID NO: 10384 - protein, 120 aa, synthetic construct
EVQLVESGGGLVQAGDSLRLSCTASGHGQAVVEMGWFRQAPGKEREFVASISGRGHPTYYADSVKGRFTISRDDARNTVYLQMNSLKPEDTAVYYCNVTIFGSGRFFEYWGQGTQVTVSS

SEQ ID NO: 10385 - protein, 120 aa, synthetic construct
EVQLVESGGGLVQAGDSLRLSCTASGMRNTIIEMGWFRQAPGKEREFVASISMRMEYTYYADSVKGRFTISRDDARNTVYLQMNSLKPEDTAVYYCNVTALIRNGFVEYWGQGTQVTVSS

SEQ ID NO: 10386 - protein, 119 aa, synthetic construct
EVQLVESGGGLVQAGDSLRLSCTASGNILRFIEMGWFRQAPGKEREFVASISARDTYTYYADSVKGRFTISRDDARNTVYLQMNSLKPEDTAVYYCNVVAWDLRFREYWGQGTQVTVSS

SEQ ID NO: 10387 - protein, 120 aa, synthetic construct
EVQLVESGGGLVQAGDSLRLSCTASGGMVKMLGMDWFRQAPGKEREFVASISSNNGYTYYADSVKGRFTISRDDARNTVYLQMNSLKPEDTAVYYCNVLLVVQGKFMEYWGQGTQVTVSS

SEQ ID NO: 10388 - protein, 111 aa, synthetic construct
EVQLVESGGGLVQAGDSLRLSCTASGDMLGKEYMGWFRQAPGKEREFVASIVLDTFTYYADSVKGRFTISRDDARNTVYLQMNSLKPEDTAVYYCNVFEYWGQGTQVTVSS

SEQ ID NO: 10389 - protein, 121 aa, synthetic construct
EVQLVESGGGLVQAGDSLRLSCTASGEMLVPIEMGWFRQAPGKEREFVASISIMRVYTYYADSVKGRFTISRDDARNTVYLQMNSLKPEDTAVYYCNVTGLKDFRTFFEYWGQGTQVTVSS

SEQ ID NO: 10390 - protein, 121 aa, synthetic construct
EVQLVESGGGLVQAGDSLRLSCTASGKMGFVVEMGWFRQAPGKEREFVASISGTEGLTYYADSVKGRFTISRDDARNTVYLQMNSLKPEDTAVYYCNVTALLVRRGFLEYWGQGTQVTVSS

SEQ ID NO: 10391 - protein, 120 aa, synthetic construct
EVQLVESGGGLVQAGDSLRLSCTASGDTLHVIEMGWFRQAPGKEREFVASISATLRYTYYADSVKGRFTISRDDARNTVYLQMNSLKPEDTAVYYCNVVVFCVSGFVEYWGQGTQVTVSS

SEQ ID NO: 10392 - protein, 122 aa, synthetic construct
EVQLVESGGGLVQAGDSLRLSCTASGGNVSILEMGWFRQAPGKEREFVASISGYGNYTYYADSVKGRFTISRDDARNTVYLQMNSLKPEDTAVYYCNVTIMCTVNHSIIEYWGQGTQVTVSS

SEQ ID NO: 10393 - protein, 120 aa, synthetic construct
EVQLVESGGGLVQAGDSLRLSCTASGLVYKVMEMGWFRQAPGKEREFVASISGDAWYTYYADSVKGRFTISRDDARNTVYLQMNSLKPEDTAVYYCNVSSWTRYVMVEYWGQGTQVTVSS

SEQ ID NO: 10394 - protein, 118 aa, synthetic construct
EVQLVESGGGLVQAGDSLRLSCTASGMRGVLLGMGWFRQAPGKEREFVADIGSCTYYADSVKGRFTISRDDARNTVYLQMNSLKPEDTAVYYCNVVVLVERGHFMEYWGQGTQVTVSS

SEQ ID NO: 10395 - protein, 117 aa, synthetic construct
EVQLVESGGGLVQAGDSLRLSCTASGVIDGIMEMGWFRQAPGKEREFVASISGQVLYTYYADSVKGRFTISRDDARNTVYLQMNSLKPEDTAVYYCNVTVLNFEEYWGQGTQVTVSS

SEQ ID NO: 10396 - protein, 120 aa, synthetic construct
EVQLVESGGGLVQAGDSLRLSCTASGMVRDVFEMGWFRQAPGKEREFVASISTNSHYTYYADSVKGRFTISRDDARNTVYLQMNSLKPEDTAVYYCNVSCFGRSVIREYWGQGTQVTVSS

SEQ ID NO: 10397 - protein, 119 aa, synthetic construct
EVQLVESGGGLVQAGDSLRLSCTASGDLRAVMEMGWFRQAPGKEREFVASISGQSDYTYYADSVKGRFTISRDDARNTVYLQMNSLKPEDTAVYYCNVVVFKVRVLEYWGQGTQVTVSS

SEQ ID NO: 10398 - protein, 112 aa, synthetic construct
EVQLVESGGGLVQAGDSLRLSCTASGMRIVFLRMGWFRQAPGKEREFVASISEFHERTYYADSVKGRFTISRDDARNTVYLQMNSLKPEDTAVYYCNVCEYWGQGTQVTVSS

SEQ ID NO: 10399 - protein, 121 aa, synthetic construct
EVQLVESGGGLVQAGDSLRLSCTASGDVGNTIEMGWFRQAPGKEREFVASISGAGFYTYYADSVKGRFTISRDDARNTVYLQMNSLKPEDTAVYYCNVLAVISMRHFVEYWGQGTQVTVSS

SEQ ID NO: 10400 - protein, 120 aa, synthetic construct
EVQLVESGGGLVQAGDSLRLSCTASGTGGMICEMGWFRQAPGKEREFVASISGRNVYTYYADSVKGRFTISRDDARNTVYLQMNSLKPEDTAVYYCNVTVVGIEGFREYWGQGTQVTVSS

SEQ ID NO: 10401 - protein, 119 aa, synthetic construct
EVQLVESGGGLVQAGDSLRLSCTASGRRADVVEMGWFRQAPGKEREFVASISGVASYTYYADSVKGRFTISRDDARNTVYLQMNSLKPEDTAVYYCNVSVWQHMFREYWGQGTQVTVSS

SEQ ID NO: 10402 - protein, 124 aa, synthetic construct
EVQLVESGGGLVQAGDSLRLSCTASGMRIVFVGMGWFRQAPGKEREFVASISGFKELTYYADSVKGRFTISRDDARNTVYLQMNSLKPEDTAVYYCNVNDRHAVGRISSSNEYWGQGTQVTVSS

SEQ ID NO: 10403 - protein, 117 aa, synthetic construct
EVQLVESGGGLVQAGDSLRLSCTASGVLLEMGWFRQAPGKEREFVASISTARAYTYYADSVKGRFTISRDDARNTVYLQMNSLKPEDTAVYYCNVTGFQHGAFVEYWGQGTQVTVSS

SEQ ID NO: 10404 - protein, 120 aa, synthetic construct
EVQLVESGGGLVQAGDSLRLSCTASGDHSKVIEMGWFRQAPGKEREFVASISGRAVYTYYADSVKGRFTISRDDARNTVYLQMNSLKPEDTAVYYCNVSKIMTAGFVEYWGQGTQVTVSS

SEQ ID NO: 10405 - protein, 121 aa, synthetic construct
EVQLVESGGGLVQAGDSLRLSCTASGGEFEMIEMGWFRQAPGKEREFVASISGGAVYTYYADSVKGRFTISRDDARNTVYLQMNSLKPEDTAVYYCNVVYYDVRRGFCEYWGQGTQVTVSS

SEQ ID NO: 10406 - protein, 120 aa, synthetic construct
EVQLVESGGGLVQAGDSLRLSCTASGLWGVVMEMGWFRQAPGKEREFVASISGQNTYTYYADSVKGRFTISRDDARNTVYLQMNSLKPEDTAVYYCNVSCIMLVGMTEYWGQGTQVTVSS

SEQ ID NO: 10407 - protein, 120 aa, synthetic construct
EVQLVESGGGLVQAGDSLRLSCTASGKRGITVEMGWFRQAPGKEREFVASISGMETMTYYADSVKGRFTISRDDARNTVYLQMNSLKPEDTAVYYCNVTRFLTLGFVEYWGQGTQVTVSS

SEQ ID NO: 10408 - protein, 119 aa, synthetic construct
EVQLVESGGGLVQAGDSLRLSCTASGSSDRIIEMGWFRQAPGKEREFVASISGMSLYTYYADSVKGRFTISRDDARNTVYLQMNSLKPEDTAVYYCNVTVLAIVFREYWGQGTQVTVSS

SEQ ID NO: 10409 - protein, 119 aa, synthetic construct
EVQLVESGGGLVQAGDSLRLSCTASGRMAKVLEMGWFRQAPGKEREFVASISGSATYTYYADSVKGRFTISRDDARNTVYLQMNSLKPEDTAVYYCNVVIIECRITEYWGQGTQVTVSS

SEQ ID NO: 10410 - protein, 121 aa, synthetic construct
EVQLVESGGGLVQAGDSLRLSCTASGVEDQVLEMGWFRQAPGKEREFVASISGWRTDTYYADSVKGRFTISRDDARNTVYLQMNSLKPEDTAVYYCNVTAVRRDMLFREYWGQGTQVTVSS

SEQ ID NO: 10411 - protein, 124 aa, synthetic construct
EVQLVESGGGLVQAGDSLRLSCTASGLIGVWLDMAWFRQAPGKEREFVASISVNQAYTYYADSVKGRFTISRDDARNTVYLQMNSLKPEDTAVYYCNVTVLKTGGARIAVLEYWGQGTQVTVSS

SEQ ID NO: 10412 - protein, 119 aa, synthetic construct
EVQLVESGGGLVQAGDSLRLSCTASGRVGVALEMGWFRQAPGKEREFVASISNRSDTYYADSVKGRFTISRDDARNTVYLQMNSLKPEDTAVYYCNVVLVYGGRFSEYWGQGTQVTVSS

SEQ ID NO: 10413 - protein, 118 aa, synthetic construct
EVQLVESGGGLVQAGDSLRLSCTASGSRVVFRDMGWFRQAPGKEREFVASISGFNYRTYYADSVKGRFTISRDDARNTVYLQMNSLKPEDTAVYYCNVVEVPNPIEYWGQGTQVTVSS

SEQ ID NO: 10414 - protein, 122 aa, synthetic construct
EVQLVESGGGLVQAGDSLRLSCTASGYGLCGLEMGWFRQAPGKEREFVASISLRESYTYYADSVKGRFTISRDDARNTVYLQMNSLKPEDTAVYYCNVAIININLMRFVEYWGQGTQVTVSS

SEQ ID NO: 10415 - protein, 119 aa, synthetic construct
EVQLVESGGGLVQAGDSLRLSCTASGDLRNPTVMGWFRQAPGKEREFVASISNYKDATYYADSVKGRFTISRDDARNTVYLQMNSLKPEDTAVYYCNVMVFANRFCEYWGQGTQVTVSS

SEQ ID NO: 10416 - protein, 119 aa, synthetic construct
EVQLVESGGGLVQAGDSLRLSCTASGDVRDVLEMGWFRQAPGKEREFVASISKMHVYTYYADSVKGRFTISRDDARNTVYLQMNSLKPEDTAVYYCNVTCIGDGFLEYWGQGTQVTVSS

SEQ ID NO: 10417 - protein, 121 aa, synthetic construct
EVQLVESGGGLVQAGDSLRLSCTASGGNGCVIDMGWFRQAPGKEREFVASISGKNEYTYYADSVKGRFTISRDDARNTVYLQMNSLKPEDTAVYYCNVVRYAMKLGFMEYWGQGTQVTVSS

SEQ ID NO: 10418 - protein, 120 aa, synthetic construct
EVQLVESGGGLVQAGDSLRLSCTASGAFGNIIEMGWFRQAPGKEREFVASISGRSTYTYYADSVKGRFTISRDDARNTVYLQMNSLKPEDTAVYYCNVLSMKQMGIGEYWGQGTQVTVSS

SEQ ID NO: 10419 - protein, 117 aa, synthetic construct
EVQLVESGGGLVQAGDSLRLSCTASGGRIVFRNMGWFRQAPGKEREFVASISGFLGVTYYADSVKGRFTISRDDARNTVYLQMNSLKPEDTAVYYCNVDVGGAEEYWGQGTQVTVSS

SEQ ID NO: 10420 - protein, 120 aa, synthetic construct
EVQLVESGGGLVQAGDSLRLSCTASGLVRYAIEMGWFRQAPGKEREFVASISSQGASTYYADSVKGRFTISRDDARNTVYLQMNSLKPEDTAVYYCNVTVLIDYRFREYWGQGTQVTVSS

SEQ ID NO: 10421 - protein, 124 aa, synthetic construct
EVQLVESGGGLVQAGDSLRLSCTASGLVGRLIEMGWFRQAPGKEREFVASISGGVDYTYYADSVKGRFTISRDDARNTVYLQMNSLKPEDTAVYYCNVSSLVGGRFNIKLVEYWGQGTQVTVSS

SEQ ID NO: 10422 - protein, 119 aa, synthetic construct
EVQLVESGGGLVQAGDSLRLSCTASGNRTLVLEMGWFRQAPGKEREFVASISTFGSYTYYADSVKGRFTISRDDARNTVYLQMNSLKPEDTAVYYCNVVTFNIGFQEYWGQGTQVTVSS

SEQ ID NO: 10423 - protein, 119 aa, synthetic construct
EVQLVESGGGLVQAGDSLRLSCTASGGFRVVLEMGWFRQAPGKEREFVASISFGTPYTYYADSVKGRFTISRDDARNTVYLQMNSLKPEDTAVYYCNVTAFTDTFTEYWGQGTQVTVSS

SEQ ID NO: 10424 - protein, 122 aa, synthetic construct
EVQLVESGGGLVQAGDSLRLSCTASGHEGRVLEMGWFRQAPGKEREFVASISGRLTFTYYADSVKGRFTISRDDARNTVYLQMNSLKPEDTAVYYCNVTIFPGVRGLIDEYWGQGTQVTVSS

SEQ ID NO: 10425 - protein, 120 aa, synthetic construct
EVQLVESGGGLVQAGDSLRLSCTASGAGVAMWFMGWFRQAPGKEREFVASISGEVQRTYYADSVKGRFTISRDDARNTVYLQMNSLKPEDTAVYYCNVWGLKDSMFFEYWGQGTQVTVSS

SEQ ID NO: 10426 - protein, 121 aa, synthetic construct
EVQLVESGGGLVQAGDSLRLSCTASGTGNVVLEMGWFRQAPGKEREFVASISATNLYTYYADSVKGRFTISRDDARNTVYLQMNSLKPEDTAVYYCNVTSLQVTGRFVEYWGQGTQVTVSS

SEQ ID NO: 10427 - protein, 119 aa, synthetic construct
EVQLVESGGGLVQAGDSLRLSCTASGMIKGILEMGWFRQAPGKEREFVASISARNEYTYYADSVKGRFTISRDDARNTVYLQMNSLKPEDTAVYYCNVTAVLHGVHEYWGQGTQVTVSS

SEQ ID NO: 10428 - protein, 120 aa, synthetic construct
EVQLVESGGGLVQAGDSLRLSCTASGGVALPMEMGWFRQAPGKEREFVASISGWSWYTYYADSVKGRFTISRDDARNTVYLQMNSLKPEDTAVYYCNVTYVVVGRIVEYWGQGTQVTVSS

SEQ ID NO: 10429 - protein, 121 aa, synthetic construct
EVQLVESGGGLVQAGDSLRLSCTASGLWGPVVEMGWFRQAPGKEREFVASISGRVQYTYYADSVKGRFTISRDDARNTVYLQMNSLKPEDTAVYYCNVTIVVNNYGFVEYWGQGTQVTVSS

SEQ ID NO: 10430 - protein, 115 aa, synthetic construct
EVQLVESGGGLVQAGDSLRLSCTASGMRIVFRSMGWFRQAPGKEREFVASISGFGSQTYYADSVKGRFTISRDDARNTVYLQMNSLKPEDTAVYYCNVSDGLEYWGQGTQVTVSS

SEQ ID NO: 10431 - protein, 121 aa, synthetic construct
EVQLVESGGGLVQAGDSLRLSCTASGNNGVVIEMGWFRQAPGKEREFVASISGLRSYTYYADSVKGRFTISRDDARNTVYLQMNSLKPEDTAVYYCNVTALDVTRCFREYWGQGTQVTVSS

SEQ ID NO: 10432 - protein, 120 aa, synthetic construct
EVQLVESGGGLVQAGDSLRLSCTASGSRIVFLPMGWFRQAPGKEREFVASISGFRLMTYYADSVKGRFTISRDDARNTVYLQMNSLKPEDTAVYYCNVVHDSVDSYPEYWGQGTQVTVSS

SEQ ID NO: 10433 - protein, 119 aa, synthetic construct
EVQLVESGGGLVQAGDSLRLSCTASGTALNVIEMGWFRQAPGKEREFVASISGGDSGTYYADSVKGRFTISRDDARNTVYLQMNSLKPEDTAVYYCRITSYRLRFHEYWGQGTQVTVSS

SEQ ID NO: 10434 - protein, 117 aa, synthetic construct
EVQLVESGGGLVQAGDSLRLSCTASGRRIVFHNMGWFRQAPGKEREFVASISGFGHITYYADSVKGRFTISRDDARNTVYLQMNSLKPEDTAVYYCNVDGHGVQEYWGQGTQVTVSS

SEQ ID NO: 10435 - protein, 120 aa, synthetic construct
EVQLVESGGGLVQAGDSLRLSCTASGHCSGAIEMGWFRQAPGKEREFVASISGHSSYTYYADSVKGRFTISRDDARNTVYLQMNSLKPEDTAVYYCNVVTLAAGTFAEYWGQGTQVTVSS

SEQ ID NO: 10436 - protein, 119 aa, synthetic construct
EVQLVESGGGLVQAGDSLRLSCTASGERIVFRKMGWFRQAPGKEREFVASISGFQGRTYYADSVKGRFTISRDDARNTVYLQMNSLKPEDTAVYYCNVDEDHLMQMEYWGQGTQVTVSS

SEQ ID NO: 10437 - protein, 118 aa, synthetic construct
EVQLVESGGGLVQAGDSLRLSCTASGWRLVFVQMGWFRQAPGKEREFVASISGFQNITYYADSVKGRFTISRDDARNTVYLQMNSLKPEDTAVYYCNVDTDKARIEYWGQGTQVTVSS

SEQ ID NO: 10438 - protein, 121 aa, synthetic construct
EVQLVESGGGLVQAGDSLRLSCTASGINGTMLEMGWFRQAPGKEREFVASISGVRCYTYYADSVKGRFTISRDDARNTVYLQMNSLKPEDTAVYYCNCTVVHFVTGFLEYWGQGTQVTVSS

SEQ ID NO: 10439 - protein, 125 aa, synthetic construct
EVQLVESGGGLVQAGDSLRLSCTASGLTGMRVEMGWFRQAPGKEREFVASISGVSNYTYYADSVKGRFTISRDDARNTVYLQMNSLKPEDTAVYYCNVTMLEGVDTGALVFREYWGQGTQVTVSS

SEQ ID NO: 10440 - protein, 120 aa, synthetic construct
EVQLVESGGGLVQAGDSLRLSCTASGGIAGVLEMGWFRQAPGKEREFVASISSTATYTYYADSVKGRFTISRDDARNTVYLQMNSLKPEDTAVYYCNVSVFAGYRLHEYWGQGTQVTVSS

SEQ ID NO: 10441 - protein, 121 aa, synthetic construct
EVQLVESGGGLVQAGDSLRLSCTASGMRVVFMPMGWFRQAPGKEREFVASISGFGAVTYYADSVKGRFTISRDDARNTVYLQMNSLKPEDTAVYYCNVGLGQETNLHLEYWGQGTQVTVSS

SEQ ID NO: 10442 - protein, 120 aa, synthetic construct
EVQLVESGGGLVQAGDSLRLSCTASGHLTTVIEMGWFRQAPGKEREFVASISGSASGTYYADSVKGRFTISRDDARNTVYLQMNSLKPEDTAVYYCNVTSFDSMRFVEYWGQGTQVTVSS

SEQ ID NO: 10443 - protein, 124 aa, synthetic construct
EVQLVESGGGLVQAGDSLRLSCTASGIERLEGSMGWFRQAPGKEREFVASISVPLERTYYADSVKGRFTISRDDARNTVYLQMNSLKPEDTAVYYCNVIGFIPIEQRFHFREYWGQGTQVTVSS

SEQ ID NO: 10444 - protein, 122 aa, synthetic construct
EVQLVESGGGLVQAGDSLRLSCTASGGMVVFLDMGWFRQAPGKEREFVASISGFGYTTYYADSVKGRFTISRDDARNTVYLQMNSLKPEDTAVYYCNVVGSDARDDVNCEYWGQGTQVTVSS

SEQ ID NO: 10445 - protein, 119 aa, synthetic construct
EVQLVESGGGLVQAGDSLRLSCTASGMRGSILEMGWFRQAPGKEREFVASISGSSAYTYYADSVKGRFTISRDDARNTVYLQMNSLKPEDTAVYYCNVTTIGFKFQEYWGQGTQVTVSS

SEQ ID NO: 10446 - protein, 120 aa, synthetic construct
EVQLVESGGGLVQAGDSLRLSCTASGGLDAMMEMGWFRQAPGKEREFVASISFRTEYTYYADSVKGRFTISRDDARNTVYLQMNSLKPEDTAVYYCNVTAIIMPRMFEYWGQGTQVTVSS

SEQ ID NO: 10447 - protein, 122 aa, synthetic construct
EVQLVESGGGLVQAGDSLRLSCTASGEGAGVIEMGWFRQAPGKEREFVASISGFQVYTYYADSVKGRFTISRDDARNTVYLQMNSLKPEDTAVYYCNVTRVNGSAALIREYWGQGTQVTVSS

SEQ ID NO: 10448 - protein, 121 aa, synthetic construct
EVQLVESGGGLVQAGDSLRLSCTASGSLDIVLEMGWFRQAPGKEREFVASISDRGPYTYYADSVKGRFTISRDDARNTVYLQMNSLKPEDTAVYYCNVVVFLRGFGFREYWGQGTQVTVSS

SEQ ID NO: 10449 - protein, 122 aa, synthetic construct
EVQLVESGGGLVQAGDSLRLSCTASGGVTGLLEMGWFRQAPGKEREFVASISYMYAYTYYADSVKGRFTISRDDARNTVYLQMNSLKPEDTAVYYCNVDGFDAGSGRFSEYWGQGTQVTVSS

SEQ ID NO: 10450 - protein, 120 aa, synthetic construct
EVQLVESGGGLVQAGDSLRLSCTASGRDVLVLEMGWFRQAPGKEREFVASISGGDRYTYYADSVKGRFTISRDDARNTVYLQMNSLKPEDTAVYYCNVTIIDETMFAEYWGQGTQVTVSS

SEQ ID NO: 10451 - protein, 122 aa, synthetic construct
EVQLVESGGGLVQAGDSLRLSCTASGKLPPILEMGWFRQAPGKEREFVASISGARRYTYYADSVKGRFTISRDDARNTVYLQMNSLKPEDTAVYYYNVSTFLFEIGSLMEYWGQGTQVTVSS

SEQ ID NO: 10452 - protein, 121 aa, synthetic construct
EVQLVESGGGLVQAGDSLRLSCTASGLWVHIVEMGWFRQAPGKEREFVASISRLQDYTYYADSVKGRFTISRDDARNTVYLQMNSLKPEDTAVYYCNVICIDVPRHFCEYWGQGTQVTVSS

SEQ ID NO: 10453 - protein, 121 aa, synthetic construct
EVQLVESGGGLVQAGDSLRLSCTASGEDNTMIEMGWFRQAPGKEREFVASISRQSGDTYYADSVKGRFTISRDDARNTVYLQMNSLKPEDTAVYYCNVTTLANAIGFVEYWGQGTQVTVSS

SEQ ID NO: 10454 - protein, 120 aa, synthetic construct
EVQLVESGGGLVQAGDSLRLSCTASGPDGSPLEMGWFRQAPGKEREFVASISCHQVYTYYADSVKGRFTISRDDARNTVYLQMNSLKPEDTAVYYCNVTMLAHRHIGEYWGQGTQVTVSS

SEQ ID NO: 10455 - protein, 122 aa, synthetic construct
EVQLVESGGGLVQAGDSLRLSCTASGSNFNPLEMGWFRQAPGKEREFVASISGAHSVTYYADSVKGRFTISRDDARNTVYLQMNSLKPEDTAVYYCNVTIFAPRTHKFEEYWGQGTQVTVSS

SEQ ID NO: 10456 - protein, 120 aa, synthetic construct
EVQLVESGGGLVQAGDSLRLSCTASGPRDGVVEMGWFRQAPGKEREFVASISGLRGHTYYADSVKGRFTISRDDARNTVYLQMNSLKPEDTAVYYCNVTRLSNGHFAEYWGQGTQVTVSS

SEQ ID NO: 10457 - protein, 120 aa, synthetic construct
EVQLVESGGGLVQAGDSLRLSCTASGSVMGSIEMGWFRQAPGKEREFVASISMRQVYTYYADSVKGRFTISRDDARNTVYLQMNSLKPEDTAVYYCNVSVLRGRFCAEYWGQGTQVTVSS

SEQ ID NO: 10458 - protein, 120 aa, synthetic construct
EVQLVESGGGLVQAGDSLRLSCTASGRGPVVMEMGWFRQAPGKEREFVASISGFSLETYYADSVKGRFTISRDDARNTVYLQMNSLKPEDTAVYYCNVTYLFAGLFLEYWGQGTQVTVSS

SEQ ID NO: 10459 - protein, 122 aa, synthetic construct
EVQLVESGGGLVQAGDSLRLSCTASGIGGGMIEMGWFRQAPGKEREFVASISVSDCLTYYADSVKGRFTISRDDARNTVYLQMNSLKPEDTAVYYCNVTRCNAFRSRFDEYWGQGTQVTVSS

SEQ ID NO: 10460 - protein, 121 aa, synthetic construct
EVQLVESGGGLVQAGDSLRLSCTASGARDGSLEMGWFRQAPGKEREFVASISCAHDGTYYADSVKGRFTISRDDARNTVYLQMNSLKPEDTAVYYCNVTVVRRLWGFDEYWGQGTQVTVSS

SEQ ID NO: 10461 - protein, 121 aa, synthetic construct
EVQLVESGGGLVQAGDSLRLSCTASGLDNEVATMGWFRQAPGKEREFVASISAHAAATYYADSVKGRFTISRDDARNTVYLQMNSLKPEDTAVYYCNVYIVSRQKFGLEYWGQGTQVTVSS

SEQ ID NO: 10462 - protein, 124 aa, synthetic construct
EVQLVESGGGLVQAGDSLRLSCTASGILDQVIEMGWFRQAPGKEREFVASISRRSDYTYYADSVKGRFTISRDDARNTVYLQMNSLKPEDTAVYYCNVTTIGHRHFVTGWVEYWGQGTQVTVSS

SEQ ID NO: 10463 - protein, 113 aa, synthetic construct
EVQLVESGGGLVQAGDSLRLSCTASGTQGVPVGMGWFRQAPGKEREFVASSVVMHTYYADSVKGRFTISRDDARNTVYLQMNSLKPEDTAVYYCNVWTYGEYWGQGTQVTVSS

SEQ ID NO: 10464 - protein, 121 aa, synthetic construct
EVQLVESGGGLVQAGDSLRLSCTASGKHNYIVEMGWFRQAPGKEREFVASISGRSLYTYYADSVKGRFTISRDDARNTVYLQMNSLKPEDTAVYYCNVVVVQAVGVIVEYWGQGTQVTVSS

SEQ ID NO: 10465 - protein, 120 aa, synthetic construct
EVQLVESGGGLVQAGDSLRLSCTASGREHTVIEMGWFRQAPGKEREFVASISGHGAYTYYADSVKGRFTISRDDARNTVYLQMNSLKPEDTAVYYCNGMEGDCPLSLEYWGQGTQVTVSS

SEQ ID NO: 10466 - protein, 120 aa, synthetic construct
EVQLVESGGGLVQAGDSLRLSCTASGSRGLVCEMGWFRQAPGKEREFVASISGQHSGTYYADSVKGRFTISRDDARNTVYLQMNSLKPEDTAVYYCNVTVFDGGQFLEYWGQGTQVTVSS

SEQ ID NO: 10467 - protein, 120 aa, synthetic construct
EVQLVESGGGLVQAGDSLRLSCTASGMRGSILEMGWFRQAPGKEREFVASISGRGQRTYYADSVKGRFTISRDDARNTVYLQMNSLKPEDTAVYYCNVTTWNAGPFLEYWGQGTQVTVSS

SEQ ID NO: 10468 - protein, 120 aa, synthetic construct
EVQLVESGGGLVQAGDSLRLSCTASGRLRVVVEMGWFRQAPGKEREFVASISGFHQDTYYADSVKGRFTISRDDARNTVYLQMNSLKPEDTAVYYCNVAGVQVTARGEYWGQGTQVTVSS

SEQ ID NO: 10469 - protein, 123 aa, synthetic construct
EVQLVESGGGLVQAGDSLRLSCTASGCSEVAMYMGWFRQAPGKEREFVASECFGFTYYADSVKGRFTISRDDARNTVYLQMNSLKPEDTAVYYCNVLSRVRAGGGEIHWVEYWGQGTQVTVSS

SEQ ID NO: 10470 - protein, 119 aa, synthetic construct
EVQLVESGGGLVQAGDSLRLSCTASGMTGLVLEMGWFRQAPGKEREFVASISMNGMYTYYADSVKGRFTISRDDARNTVYLQMNSLKPEDTAVYYCNVTALVLYVVEYWGQGTQVTVSS

SEQ ID NO: 10471 - protein, 115 aa, synthetic construct
EVQLVESGGGLVQAGDSLRLSCTASGLTRGIHEMGWFRQAPGKEREFVAVLLRGQTYYADSVKGRFTISRDDARNTVYLQMNSLKPEDTAVYYCNVMLRGGDEYWGQGTQVTVSS

SEQ ID NO: 10472 - protein, 120 aa, synthetic construct
EVQLVESGGGLVQAGDSLRLSCTASGSRGHVIEMGWFRQAPGKEREFVASISGAGYMTYYADSVKGRFTISRDDARNTVYLQMNSLKPEDTAVYYCNVTARGLVGFLEYWGQGTQVTVSS

SEQ ID NO: 10473 - protein, 121 aa, synthetic construct
EVQLVESGGGLVQAGDSLRLSCTASGVGTDVLEMGWFRQAPGKEREFVASISGQGRLTYYADSVKGRFTISRDDARNTVYLQMNSLKPEDTAVYYCNVTVYMRQCRFIEYWGQGTQVTVSS

SEQ ID NO: 10474 - protein, 121 aa, synthetic construct
EVQLVESGGGLVQAGDSLRLSCTASGMEGMVVEMGWFRQAPGKEREFVASISGQRAYTYYADSVKGRFTISRDDARNTVYLQMNSLKPEDTAVYYCNVTTTGSIKFINEYWGQGTQVTVSS

SEQ ID NO: 10475 - protein, 121 aa, synthetic construct
EVQLVESGGGLVQAGDSLRLSCTASGEPKLIVDMGWFRQAPGKEREFVASISGTNSYTYYADSVKGRFTISRDDARNTVYLQMNSLKPEDTAVYYCNVTVVSQARRFLEYWGQGTQVTVSS

SEQ ID NO: 10476 - protein, 119 aa, synthetic construct
EVQLVESGGGLVQAGDSLRLSCTASGVSDKVLEMGWFRQAPGKEREFVASISKRNQYTYYADSVKGRFTISRDDARNTVYLQMNSLKPEDTAVYYCNVTVLSRSIDEYWGQGTQVTVSS

SEQ ID NO: 10477 - protein, 120 aa, synthetic construct
EVQLVESGGGLVQAGDSLRLSCTASGDAGIILEMGWFRQAPGKEREFVASISWRYLRTYYADSVKGRFTISRDDARNTVYLQMNSLKPEDTAVYYCNVTGHDMEHFSEYWGQGTQVTVSS

SEQ ID NO: 10478 - protein, 122 aa, synthetic construct
EVQLVESGGGLVQAGDSLRLSCTASGALVRVMEMGWFRQAPGKEREFVASISGAGWYTYYADSVKGRFTISRDDARNTVYLQMNSLKPEDTAVYYCNVTGFIVGGLNIVEYWGQGTQVTVSS

SEQ ID NO: 10479 - protein, 125 aa, synthetic construct
EVQLVESGGGLVQAGDSLRLSCTASGYASELIEMGWFRQAPGKEREFVASISHVSEYTYYADSVKGRFTISRDDARNTVYLQMNSLKPEDTAVYYCNVLGREVRSGNYVRIVEYWGQGTQVTVSS

SEQ ID NO: 10480 - protein, 121 aa, synthetic construct
EVQLVESGGGLVQAGDSLRLSCTASGTERAALEMGWFRQAPGKEREFVASISGTHRYTYYADSVKGRFTISRDDARNTVYLQMNSLKPEDTAVYYCNVVTVDFDVGFLEYWGQGTQVTVSS

SEQ ID NO: 10481 - protein, 120 aa, synthetic construct
EVQLVESGGGLVQAGDSLRLSCTASGPSGAILEMGWFRQAPGKEREFVASISGKLIYTYYADSVKGRFTISRDDARNTVYLQMNSLKPEDTAVYYCNVSLWTGSRLTEYWGQGTQVTVSS

SEQ ID NO: 10482 - protein, 121 aa, synthetic construct
EVQLVESGGGLVQAGDSLRLSCTASGSRMRVVEMGWFRQAPGKEREFVASISMGTMYTYYADSVKGRFTISRDDARNTVYLQMNSLKPEDTAVYYCNVTRVGASGRFHEYWGQGTQVTVSS

SEQ ID NO: 10483 - protein, 117 aa, synthetic construct
EVQLVESGGGLVQAGDSLRLSCTASGSKEGLIEMGWFRQAPGKEREFVASISASRAYTYYADSVKGRFTISRDDARNTVYLQMNSLKPEDTAVYYCNVTTTDFGEYWGQGTQVTVSS

SEQ ID NO: 10484 - protein, 124 aa, synthetic construct
EVQLVESGGGLVQAGDSLRLSCTASGVQGTPMEMGWFRQAPGKEREFVASISYERLSTYYADSVKGRFTISRDDARNTVYLQMNSLKPEDTAVYYCNVTCTRLREVRLSFVEYWGQGTQVTVSS

SEQ ID NO: 10485 - protein, 121 aa, synthetic construct
EVQLVESGGGLVQAGDSLRLSCTASGCSRRVIEMGWFRQAPGKEREFVASISGYLEYTYYADSVKGRFTISRDDARNTVYLQMNSLKPEDTAVYYCNVTVCSSNFVFAEYWGQGTQVTVSS

SEQ ID NO: 10486 - protein, 119 aa, synthetic construct
EVQLVESGGGLVQAGDSLRLSCTASGWWKWVGEMGWFRQAPGKEREFVASISKIGTYTYYADSVKGRFTISRDDARNTVYLQMNSLKPEDTAVYYCNVTVMSNTFAEYWGQGTQVTVSS

SEQ ID NO: 10487 - protein, 120 aa, synthetic construct
EVQLVESGGGLVQAGDSLRLSCTASGQTSRVLEMGWFRQAPGKECEFVASISVLRSYTYYADSVKGRFTISRDDARNTVYLQMNSLKPEDTAVYYCNVVVVVDMRFQEYWGQGTQVTVSS

SEQ ID NO: 10488 - protein, 120 aa, synthetic construct
EVQLVESGGGLVQAGDSLRLSCTASGREVQGIEMGWFRQAPGKEREFVASISTGHLYTYYADSVKGRFTISRDDARNTVYLQMNSLKPEDTAVYYCNVTVFGDLGFIEYWGQGTQVTVSS

SEQ ID NO: 10489 - protein, 119 aa, synthetic construct
EVQLVESGGGLVQAGDSLRLSCTASGTTGRTLEMGWFRQAPGKEREFVASISIVHHLTYYADSVKGRFTISRDDARNTVYLQMNSLKPEDTAVYYCNVTAIQRIFVEYWGQGTQVTVSS

SEQ ID NO: 10490 - protein, 120 aa, synthetic construct
EVQLVESGGGLVQAGDSLRLSCTASGQVESMLEMGWFRQAPGKEREFVASISARSGVTYYADSVKGRFTISRDDARNTVYLQMNSLKPEDTAVYYCNVTSLGDDAFEEYWGQGTQVTVSS

SEQ ID NO: 10491 - protein, 120 aa, synthetic construct
EVQLVESGGGLVQAGDSLRLSCTASGQVLFLTAMGWFRQAPGKEREFVASISSTCSDTYYADSVKGRFTISRDDARNTVYLQMNSLKPEDTAVYYCNVGVVSSAGWAEYWGQGTQVTVSS

SEQ ID NO: 10492 - protein, 121 aa, synthetic construct
EVQLVESGGGLVQAGDSLRLSCTASGLARNVLEMGWFRQAPGKEREFVASISNNGSYTYYADSVKGRFTISRDDARNTVYLQMNSLKPEDTAVYYCNVSVIGILERPKEYWGQGTQVTVSS

SEQ ID NO: 10493 - protein, 122 aa, synthetic construct
EVQLVESGGGLVQAGDSLRLSCTASGVNDGYLEMGWFRQAPGKEREFVASISHSGRLTYYADSVKGRFTISRDDARNTVYLQMNSLKPEDTAVYYCNVVILDVACFRFIEYWGQGTQVTVSS

SEQ ID NO: 10494 - protein, 120 aa, synthetic construct
EVQLVESGGGLVQAGDSLRLSCTASGNVVWVLEMGWFRQAPGKEREFVASISGKGASTYYADSVKGRFTISRDDARNTVYLQMNSLKPEDTAVYYCNVTVVKQLHFWEYWGQGTQVTVSS

SEQ ID NO: 10495 - protein, 120 aa, synthetic construct
EVQLVESGGGLVQAGDSLRLSCTASGVGSRCIEMGWFRQAPGKEREFVASISRTGEYTYYADSVKGRFTISRDDARNTVYLQMNSLKPEDTAVYYCNVVVMVFTMFREYWGQGTQVTVSS

SEQ ID NO: 10496 - protein, 119 aa, synthetic construct
EVQLVESGGGLVQAGDSLRLSCTASGLVRRIIHMGWFRQAPGKEREFVASISRMNQETYYADSVKGRFTISRDDARNTVYLQMNSLKPEDTAVYYCNVLGFFNDSAEYWGQGTQVTVSS

SEQ ID NO: 10497 - protein, 121 aa, synthetic construct
EVQLVESGGGLVQAGDSLRLSCTASGKTGVTLEMGWFRQAPGKEREFVASISEVDRFTYYADSVKGRFTISRDDARNTVYLQMNSLKPEDTAVYYCNVTVHLLRRGFAEYWGQGTQVTVSS

SEQ ID NO: 10498 - protein, 120 aa, synthetic construct
EVQLVESGGGLVQAGDSLRLSCTASGHVKEVMEMGWFRQAPGKEREFVASISSRIVYTYYADSVKGRFTISRDDARNTVYLQMNSLKPEDTAVYYCNVSAIKAPRFVEYWGQGTQVTVSS

SEQ ID NO: 10499 - protein, 121 aa, synthetic construct
EVQLVESGGGLVQAGDSLRLSCTASGIGCRVLEMGWFRQAPGKEREFVASISGSAVATYYADSVKGRFTISRDDARNTVYLQMNSLKPEDTAVYYCNVTVLIMPAAFVEYWGQGTQVTVSS

SEQ ID NO: 10500 - protein, 119 aa, synthetic construct
EVQLVESGGGLVQAGDSLRLSCTASGEVTIIEMGWFRQAPGKEREFVASISGSRKYTYYADSVKGRFTISRDDARNTVYLQMNSLKPEDTAVYYCNVVGLTSGFFAEYWGQGTQVTVSS

SEQ ID NO: 10501 - protein, 119 aa, synthetic construct
EVQLVESGGGLVQAGDSLRLSCTASGEWAYWIEMGWFRQAPGKEREFVASISWDVLTYYADSVKGRFTISRDDARNTVYLQMNSLKPEDTAVYYCNVSVWNWDRFNEYWGQGTQVTVSS

SEQ ID NO: 10502 - protein, 124 aa, synthetic construct
EVQLVESGGGLVQAGDSLRLSCTASGLLHRVMEMGWFRQAPGKEREFVASISEGGVYTYYADSVKGRFTISRDDARNTVYLQMNSLKPEDTAVYYCNVCVVVRSGMGFGFMEYWGQGTQVTVSS

SEQ ID NO: 10503 - protein, 121 aa, synthetic construct
EVQLVESGGGLVQAGDSLRLSCTASGEDVLVGVMGWFRQAPGKEREFVASISRLHSGTYYADSVKGRFTISRDDARNTVYLQMNSLKPEDTAVYYCNVTYVGRIGFGLEYWGQGTQVTVSS

SEQ ID NO: 10504 - protein, 120 aa, synthetic construct
EVQLVESGGGLVQAGDSLRLSCTASGVVGCVLEMGWFRQAPGKEREFVASISGDIRYTYYADSVKGRFTISRDDARNTVYLQMNSLKPEDTAVYYCNVMMVEVDGFSEYWGQGTQVTVSS

SEQ ID NO: 10505 - protein, 120 aa, synthetic construct
EVQLVESGGGLVQAGDSLRLSCTASGDGHGLIEMGWFRQAPGKEREFVASISVMRDYTYYADSVKGRFTISRDDARNTVYLQMNSLKPEDTAVYYCNVVRNDGRGFLEYWGQGTQVTVSS

SEQ ID NO: 10506 - protein, 119 aa, synthetic construct
EVQLVESGGGLVQAGDSLRLSCTASGGNVIYLEMGWFRQAPGKEREFVASISDSSIYTYYADSVKGRFTISRDDARNTVYLQMNSLKPEDTAVYYCNVLAIGAKIREYWGQGTQVTVSS

SEQ ID NO: 10507 - protein, 120 aa, synthetic construct
EVQLVESGGGLVQAGDSLRLSCTASGMGKNILEMGWFRQAPGKEREFVASISGSNALTYYADSVKGRFTISRDDARNTVYLQMNSLKPEDTAVYYCNVTTYHMRVFGEYWGQGTQVTVSS

SEQ ID NO: 10508 - protein, 118 aa, synthetic construct
EVQLVESGGGLVQAGDSLRLSCTASGDSAVLIEMGWFRQAPGKEREFVASISGFGHDTYYADSVKGRFTISRDDARNTVYLQMNSLKPEDTAVYYCNVDAQVGVIEYWGQGTQVTVSS

SEQ ID NO: 10509 - protein, 116 aa, synthetic construct
EVQLVESGGGLVQAGDSLRLSCTASGGHAKPIEMGWFRQAPGKEREFVASISMNWVYTYYADSVKGRFTISRDDARNTVYLQMNSLKPEDTAVYYCRSSQIFEEYWGQGTQVTVSS

SEQ ID NO: 10510 - protein, 122 aa, synthetic construct
EVQLVESGGGLVQAGDSLRLSCTANGDVHFVLEMGWFRQAPGKEREFVASISKAKEYTYYADSVKGRFTISRDDARNTVYLQMNSLKPEDTAVYYCNVVCVRNNFRLFSEYWGQGTQVTVSS

SEQ ID NO: 10511 - protein, 121 aa, synthetic construct
EVQLVESGGGLVQAGDSLRLSCTASGMLGLILEMGWFRQAPGKEREFVASISRRTDGTYYADSVKGRFAISRDDARNTVYLQMNSLKPEDTAVYYCNVTNYGAVVGFLEYWGQGTQVTVSS

SEQ ID NO: 10512 - protein, 119 aa, synthetic construct
EVQLVESGGGLVQAGDSLRLSCTASGTWRRMLEMGWFRQAPGKEREFVASISVRGIYTYYADSVKGRFTISRDDARNTVYLQMNSLKPEDTAVYYCNVVVIGDTFTEYWGQGTQVTVSS

SEQ ID NO: 10513 - protein, 124 aa, synthetic construct
EVQLVESGGGLVQAGDSLRLSCTASGYRGTVVEMGWFRQAPGKEREFVASISGMTAYTYYADSVKGRFTISRDDARNTVYLQMNSLKPEDTAVYYCNVVLFSGSVNNERFLEYWGQGTQVTVSS

SEQ ID NO: 10514 - protein, 120 aa, synthetic construct
EVQLVESGGGLVQAGDSLRLSCTASGRIIDVLEMGWFRQAPGKEREFVASISGRNHYTYYADSVKGRFTISRDDARNTVYLQMNSLKPEDTAVYYCNVSLYWPPNILEYWGQGTQVTVSS

SEQ ID NO: 10515 - protein, 121 aa, synthetic construct
EVQLVESGGGLVQAGDSLRLSCTASGCVRVFVEMGWFRQAPGKEREFVASISGMGSYTYYADSVKGRFTISRDDARNTVYLQMNSLKPEDTAVYYCNVTCITNVGAMVEYWGQGTQVTVSS

SEQ ID NO: 10516 - protein, 120 aa, synthetic construct
EVQLVESGGGLVQAGDSLRLSCTASGTLCALIEMGWFRQAPGKEREFVASISGLYGSTYYADSVKGRFTISRDDARNTVYLQMNSLKPEDTAVYYCNVTAFLDNGFKEYWGQGTQVTVSS

SEQ ID NO: 10517 - protein, 119 aa, synthetic construct
EVQLVESGGGLVQAGDSLRLSCTASGHNMLEMGWFRQAPGKEREFVASISVRDGNTYYADSVKGRFTISRDDARNTVYLQMNSLKPEDTAVYYCNVTSVRVSGFFDEYWGQGTQVTVSS

SEQ ID NO: 10518 - protein, 122 aa, synthetic construct
EVQLVESGGGLVQAGDSLRLSCTASGKCGIVLEMGWFRQAPGKEREFVASISVPRAYTYYADSVKGRFTISRDDARNTVYLQMNSLKPEDTAVYYCNVWIIGTSNPRFLEYWGQGTQVTVSS

SEQ ID NO: 10519 - protein, 121 aa, synthetic construct
EVQLVESGGGLVQAGDSLRLSCTASGHFNPWLEMGWFRQAPGKEREFVASISFSALFTYYADSVKGRFTISRDDARNTVYLQMNSLKPEDTAVYYCNVTTVMPRIGFVEYWGQGTQVTVSS

SEQ ID NO: 10520 - protein, 122 aa, synthetic construct
EVQLVESGGGLVQAGDSLRLSCTASGTKGVVLEMGWFRQAPGKEREFVASISMGKVYTYYADSVKGRFTISRDDARNTVYLQMNSLKPEDTAVYYCNVVSVARDTCMFWEYWGQGTQVTVSS

SEQ ID NO: 10521 - protein, 120 aa, synthetic construct
EVQLVESGGGLVQAGDSLRLSCTASGYGGNLIEMGWFRQAPGKEREFVASISVSHQGTYYADSVKGRFTISRDDARNTVYLQMNSLKPEDTAVYYCNVWEVVRVGFIEYWGQGTQVTVSS

SEQ ID NO: 10522 - protein, 117 aa, synthetic construct
EVQLVESGGGLVQAGDSLRLSCTASGRGNGRLRMGWFRQAPGKEREFVASISVGTTHTYYADSVKGRFTISRDDARNTVYLQMNSLKPEDTAVYYCNVLYMDWTEYWGQGTQVTVSS

SEQ ID NO: 10523 - protein, 120 aa, synthetic construct
EVQLVESGGGLVQAGDSLRLSCTASGLTDRVMEMGWFRQAPGKEREFVASISGTTAMTYYADSVKGRFTISRDDARNTVYLQMNSLKPEDTAVYYCNVCCLENIKFTEYWGQGTQVTVSS

SEQ ID NO: 10524 - protein, 120 aa, synthetic construct
EVQLVESGGGLVQAGDSLRLSCTASGHRDRFIEMGWFRQAPGKEREFVASISGIGTYTYYADSVKGRFTISRDDARNTVYLQMNSLKPEDTAVYYCNVVLFSTDGVEEYWGQGTQVTVSS

SEQ ID NO: 10525 - protein, 121 aa, synthetic construct
EVQLVESGGGLVQAGDSLRLSCTASGVRETIIEMGWFRQAPGKEREFVASISGLSTYTYYADSVKGRFTISRDDARNTVYLQMNSLKPEDTAVYYCNVTAMVDNVGIHEYWGQGTQVTVSS

SEQ ID NO: 10526 - protein, 115 aa, synthetic construct
EVQLVESGGGLVQAGDSLRLSCTASGERLVFREMGWFRQAPGKEREFVASISGFGLGTYYADSVKGRFTISRDDARNTVYLQMNSLKPEDTAVYYCNVLLRGEYWGQGTQVTVSS

SEQ ID NO: 10527 - protein, 124 aa, synthetic construct
EVQLVESGGGLVQAGDSLRLSCTASGDSGVMLEMGWFRQAPGKEREFVASISNSSALTYYADSVKGRFTISRDDARNTVYLQMNSLKPEDTAVYYCNVTVFRGADAISPFGEYWGQGTQVTVSS

SEQ ID NO: 10528 - protein, 118 aa, synthetic construct
EVQLVESGGGLVQAGDSLRLSCTASGQRIVFQGMGWFRQAPGKEREFVASISGFHLDTYYADSVKGRFTISRDDARNTVYLQMNSLKPEDTAVYYCNVACFTVRAEYWGQGTQVTVSS

SEQ ID NO: 10529 - protein, 123 aa, synthetic construct
EVQLVESGGGLVQAGDSLRLSCTASGMHVSWMEMGWFRQAPGKEREFVASISYGSTYTYYADSVKGRFTISRDDARNTVYLQMNSLKPEDTAVYYCNVTVFVPLVVRKFMEYWGQGTQVTVSS

SEQ ID NO: 10530 - protein, 120 aa, synthetic construct
EVQLVESGGGLVQAGDSLRLSCTASGNVLGLMEMGWFRQAPGKEREFVASISTRMDYTYYADSVKGRFTISRDDARNTVYLQMNSLKPEDTAVYYCNVTSLSRGRAREYWGQGTQVTVSS

SEQ ID NO: 10531 - protein, 115 aa, synthetic construct
EVQLVESGGGLVQAGDSLRLSCTASGVMMGSGVMGWFRQAPGKEREFVASISIYSGVTYYADSVKGRFTISRDDARNTVYLQMNSLKPEDTAVYYCRDMFVREYWGQGTQVTVSS

SEQ ID NO: 10532 - protein, 121 aa, synthetic construct
EVQLVESGGGLVQAGDSLRLSCTASGSLGCVIEMGWFRQAPGKEREFVASISGLDRLTYYADSVKGRFTISRDDARNTVYLQMNSLKPEDTAVYYCNVTMLKVTQRFLEYWGQGTQVTVSS

SEQ ID NO: 10533 - protein, 121 aa, synthetic construct
EVQLVESGGGLVQAGDSLRLSCTASGLTGPSMEMGWFRQAPGKEREFVASISVVRGDTYYADSVKGRFTISRDDARNTVYLQMNSLKPEDTAVYYCNVSVWDSAFRLLEYWGQGTQVTVSS

SEQ ID NO: 10534 - protein, 123 aa, synthetic construct
EVQLVESGGGLVQAGDSLRLSCTASGMVAVVLEMGWFRQAPGKEREFVASISGCGDSTYYADSVKGRFTISRDDARNTVYLQMNSLKPEDTAVYYCNVTSLQGHRSFSFVEYWGQGTQVTVSS

SEQ ID NO: 10535 - protein, 117 aa, synthetic construct
EVQLVESGGGLVQAGDSLRLSCTASGVQHGLLEMGWFRQAPGKEREFVASISSIGVYTYYADSVKGRFTISRDDARNTVYLQMNSLKPEDTAVYYCNVTSVFFEEYWGQGTQVTVSS

SEQ ID NO: 10536 - protein, 119 aa, synthetic construct
EVQLVESGGGLVQAGDSLRLSCTASGLVHVVEMGWFRQAPGKEREFVASISGVGWRTYYADSVKGRFTISRDDARNTVYLQMNSLKPEDTAVYYCNSTVVTNARFHEYWGQGTQVTVSS

SEQ ID NO: 10537 - protein, 121 aa, synthetic construct
EVQLVESGGGLVQAGDSLRLSCTASGLTGMRVEMGWFRQAPGKEREFVASISGFGHDTYYADSVKGRFTISRDDARNTVYLQMNSLKPEDTAVYYCNVGEAGPTNELREYWGQGTQVTVSS

SEQ ID NO: 10538 - protein, 119 aa, synthetic construct
EVQLVESGGGLVQAGDSLRLSCTASGVPPVAVEMGWFRQAPGKEREFVASISMRGQYTYYADSVKGRFTISRDDARNTVYLQMNSLKPEDTAVYYCNVSVMRGRLMEYWGQGTQVTVSS

SEQ ID NO: 10539 - protein, 123 aa, synthetic construct
EVQLVESGGGLVQAGDSLRLSCTASGMNGVTVEMSWFRQAPGKEREFVASISGSAALTYYADSVKGRFTISRDDARNTVYLQMNSLKPEDTAVYYCNVTVVTGMRLMWFFEYWGQGTQVTVSS

SEQ ID NO: 10540 - protein, 120 aa, synthetic construct
EVQLVESGGGLVQAGDSLRLSCTASGPVANTLEMGWFRQAPGKEREFVASISYAHRLTYYADSVKGRFTISRDDARNTVYLQMNSLKPEDTAVYYCNVTMIMSAGFIEYWGQGTQVTVSS

SEQ ID NO: 10541 - protein, 120 aa, synthetic construct
EVQLVESGGGLVQAGDSLRLSCTASGLTTMPIEMGWFRQAPGKEREFVASISRVRNYTYYADSVKGRFTISRDDARNTVYLQMNSLKPEDTAVYYCNVTILGAGWLMEYWGQGTQVTVSS

SEQ ID NO: 10542 - protein, 124 aa, synthetic construct
EVQLVESGGGLVQAGDSLRLSCTASGMKGHTLEMGWFRQAPGKEREFVASISRSTDYTYYADSVKGRFTISRDDARNTVYLQMNSLKPEDTAVYYCNVSIMVVVNSVVRLMEYWGQGTQVTVSS

SEQ ID NO: 10543 - protein, 123 aa, synthetic construct
EVQLVESGGGLVQAGDSLRLSCTASGGEVRCIEMGWFRQAPGKEREFVASISDMLAYTYYADSVKGRFTISRDDARNTVYLQMNSLKPEDTAVYYCNVTVIQVHELIGIREYWGQGTQVTVSS

SEQ ID NO: 10544 - protein, 121 aa, synthetic construct
EVQLVESGGGLVQAGDSLRLSCTASGIMGIMVEMGWFRQAPGKEREFVASISGRGSTTYYADSVKGRFTISRDDARNTVYLQMNSLKPEDTAVYYCNVTIYGSMSGFEEYWGQGTQVTVSS

SEQ ID NO: 10545 - protein, 119 aa, synthetic construct
EVQLVESGGGLVQAGDSLRLSCTASGRVIRVIEMGWFRQAPGKEREFVASISGNLAYTYYADSVKGRFTISRDDARNTVYLQMNSLKPEDTAVYYCNVVVVSVRFVEYWGQGTQVTVSS

SEQ ID NO: 10546 - protein, 125 aa, synthetic construct
EVQLVESGGGLVQAGDSLRLSCTASGVTVRWWDMGWFRQAPGKEREFVASISIGTSGTYYADSVKGRFTISRDDARNTVYLQMNSLKPEDTAVYYCNVKLIRKIGGVIVVFSEYWGQGTQVTVSS

SEQ ID NO: 10547 - protein, 121 aa, synthetic construct
EVQLVESGGGLVQAGDSLRLSCTASGRTGTMIEMGWFRQAPGKEREFVASISGSTAYTYYADSVKGRFTISRDDARNTVYLQMNSLKPEDTAVYYCNVTRVSFGLHFMEYWGQGTQVTVSS

SEQ ID NO: 10548 - protein, 122 aa, synthetic construct
EVQLVESGGGLVQAGDSLRLSCTASGIRMLVIEMGWFRQAPGKEREFVASISGTTVGTYYADSVKGRFTISRDDARNTVYLQMNSLKPEDTAVYYCNVTVYVQPCHRFIEYWGQGTQVTVSS

SEQ ID NO: 10549 - protein, 112 aa, synthetic construct
EVQLVESGGGLVQAGDSLRLSCTASGNSDRGCWMGWFRQAPGKEREFVAVSLGANGTYYADSVKGRFTISRDDARNTVYLQMNSLKPEDTAVYYCNVDGEYWGQGTQVTVSS

SEQ ID NO: 10550 - protein, 121 aa, synthetic construct
EVQLVESGGGLVQAGDSLRLSCTASGTGLTFLEMGWFRQAPGKEREFVASISGSMAYTYYADSVKGRFTISRDDARNTVYLQMNSLKPEDTAVYYCNVVSLFRGMYFVEYWGQGTQVTVSS

SEQ ID NO: 10551 - protein, 122 aa, synthetic construct
EVQLVESGGGLVQAGDSLRLSCTASGHIQMLLEMGWFRQAPGKEREFVASISNVHGYTYYADSVKGRFTISRDDARNTVYLQMNSLKPEDTAVYYCNVTGFDVILGAFTEYWGQGTQVTVSS

SEQ ID NO: 10552 - protein, 119 aa, synthetic construct
EVQLVESGGGLVQAGDSLRLSCTASGIMGHMLEMGWFRQAPGKEREFVASISVRNTYTYYADSVKGRFTISRDDARNTVYLQMNSLKPEDTAVYYCNVTCINGSLSEYWGQGTQVTVSS

SEQ ID NO: 10553 - protein, 119 aa, synthetic construct
EVQLVESGGGLVQAGDSLRLSCTASGDVSGMIEMGWFRQAPGKEREFVASISTNGVYTYYADSVKGRFTISRDDARNTVYLQMNSLKPEDTAVYYCNVTSLSNVVQEYWGQGTQVTVSS

SEQ ID NO: 10554 - protein, 121 aa, synthetic construct
EVQLVESGGGLVQAGDSLRLSCTASGRDAWLVEMGWFRQAPGKEREFVASISAHGVVTYYADSVKGRFTISRDDARNTVYLQMNSLKPEDTAVYYCNVTALYVGKGFVEYWGQGTQVTVSS

SEQ ID NO: 10555 - protein, 120 aa, synthetic construct
EVQLVESGGGLVQAGDSLRLSCTASGESLDGVEMGWFRQAPGKEREFVASISIRTHITYYADSVKGRFTISRDDARNTVYLQMNSLKPEDTAVYYCNVTVINWPRFMEYWGQGTQVTVSS

SEQ ID NO: 10556 - protein, 120 aa, synthetic construct
EVQLVESGGGLVQAGDSLRLSCTASGLRYQPMEMGWFRQAPGKEREFVASISASVGNTYYADSVKGRFTISRDDARNTVYLQMNSLKPEDTAVYYCNVTSFVGYGFMEYWGQGTQVTVSS

SEQ ID NO: 10557 - protein, 124 aa, synthetic construct
EVQLVESGGGLVQAGDSLRLSCTASGCIDSVLEMGWFRQAPGKEREFVASISGNSDYTYYADSVKGRFTISRDDARNTVYLQMNSLKPEDTAVYYCNVVCVTQDIARLRINEYWGQGTQVTVSS

SEQ ID NO: 10558 - protein, 120 aa, synthetic construct
EVQLVESGGGLVQAGDSLRLSCTASGRMGVVMEMGWFRQAPGKEREFVASISGMECYTYYADSVKGRFTISRDDARNTVYLQMNSLKPEDTAVYYCNVTVFGSVFRMEYWGQGTQVTVSS

SEQ ID NO: 10559 - protein, 123 aa, synthetic construct
EVQLVESGGGLVQAGDSLRLSCTASGIIQDVMEMGWFRQAPGKEREFVASIGRNVYTYYADSVKGRFTISRDDARNTVYLQMNSLKPEDTAVYYCNVTVFRTIELFVGKLEYWGQGTQVTVSS

SEQ ID NO: 10560 - protein, 120 aa, synthetic construct
EVQLVESGGGLVQAGDSLRLSCTASGTMAGVMEMGWFRQAPGKEREFVASISGRGSETYYADSVKGRFTISRDDARNTVYLQMNSLKPEDTAVYYCNVTCYWMHLFWEYWGQGTQVTVSS

SEQ ID NO: 10561 - protein, 120 aa, synthetic construct
EVQLVESGGGLVQAGDSLRLSCTASGNVDTVLEMGWFRQAPGKEREFVASISLMSAYTYYADSVKGRFTISRDDARNTVYLQMNSLKPEDTAVYYCNVTRVTLYGFHEYWGQGTQVTVSS

SEQ ID NO: 10562 - protein, 119 aa, synthetic construct
EVQLVESGGGLVQAGDSLRLSCTASGMSCLVIEMGWFRQAPGKEREFVASISGGVRYTYYADSVKGRFTISRDDARNTVYLQMNSLKPEDTAVYYCNVTVLRGRFFEYWGQGTQVTVSS

SEQ ID NO: 10563 - protein, 111 aa, synthetic construct
EVQLVESGGGLVQAGDSLRLSCTASGRWLKDLMMGWFRQAPGKEREFVAVITRMDWTYYADSVKGRFTISRDDARNTVYLQMNSLKPEDTAVYYCNVGEYWGQGTQVTVSS

SEQ ID NO: 10564 - protein, 119 aa, synthetic construct
EVQLVESGGGLVQAGDSLRLSCTASGGNGMLGLMGWFRQAPGKEREFVAVSMHSGRTYYADSVKGRFTISRDDARNTVYLQMNSLKPEDTAVYYCNVELVHMHDFDEYWGQGTQVTVSS

SEQ ID NO: 10565 - protein, 120 aa, synthetic construct
EVQLVESGGGLVQAGDSLRLSCTASGSDGYVIDMGWFRQAPGKEREFVASISGAGTYTYYADSVKGRFTISRDDARNTVYLQMNSLKPEDTAVYYCNVTVITCGGVIEYWGQGTQVTVSS

SEQ ID NO: 10566 - protein, 122 aa, synthetic construct
EVQLVESGGGLVQAGDSLRLSCTASGYRLVFSDMGWFRQAPGKEREFVASISGFHFLTYYADSVKGRFTISRDDARNTVYLQMNSLKPEDTAVYYCNVISGYSGKAGTMEYWGQGTQVTVSS

SEQ ID NO: 10567 - protein, 122 aa, synthetic construct
EVQLVESGGGLVQAGDSLRLSCTASGILTNSIEMGWFRQAPGKEREFVASISTRDDLTYYADSVKGRFTISRDDARNTVYLQMNSLKPEDTAVYYCNVTVVSHRLMRIIEYWGQGTQVTVSS

SEQ ID NO: 10568 - protein, 120 aa, synthetic construct
EVQLVESGGGLVQAGDSLRLSCTASGIHRDGIEMGWFRQAPGKEREFVASISFSQHATYYADSVKGRFTISRDDARNTVYLQMNSLKPEDTAVYYCNVTVLGRCGFVEYWGQGTQVTVSS

SEQ ID NO: 10569 - protein, 122 aa, synthetic construct
EVQLVESGGGLVQAGDSLRLSCTASGGVRDVIEMGWFRQAPGKEREFVASISGTGFYTYYADSVKGRFTISRDDARNTVYLQMNSLKPEDTAVYYCNVVFIMRKIGVVVEYWGQGTQVTVSS

SEQ ID NO: 10570 - protein, 116 aa, synthetic construct
EVQLVESGGGLVQAGDSLRLSCTASGIGFVIQEMGWFRQAPGKEREFVAVGIHGRTYYADSVKGRFTISRDDARNTVYLQMNSLKPEDTAVYYCNVFFHNDSLEYWGQGTQVTVSS

SEQ ID NO: 10571 - protein, 119 aa, synthetic construct
EVQLVESGGGLVQAGDSLRLSCTASGHAGILVEMGWFRQAPGKEREFVASISKDGEYTYYADSVKGRFTISRDDARNTVYLQMNSLKPEDTAVYYCNVVVLGRGFREYWGQGTQVTVSS

SEQ ID NO: 10572 - protein, 124 aa, synthetic construct
EVQLVESGGGLVQAGDSLRLSCTASGKGNGVIEMGWFRQAPGKEREFVASISGVAQYTYYADSVKGRFTISRDDARNTVYLQMNSLKPEDTAVYYCNVCLFVVHRNLGGFVEYWGQGTQVTVSS

SEQ ID NO: 10573 - protein, 120 aa, synthetic construct
EVQLVESGGGLVQAGDSLRLSCTASGQRSMLIEMGWFRQAPGKEREFVASISGGGTYTYYADSVKGRFTISRDDARNTVYLQMNSLKPEDTAVYYCNISVFTGVKLLEYWGQGTQVTVSS

SEQ ID NO: 10574 - protein, 125 aa, synthetic construct
EVQLVESGGGLVQAGDSLRLSCTASGGRNGVIEMGWFRQAPGKEREFVASISGSGAYTYYADSVKGRFTISRDDARNTVYLQMNSLKPEDTAVYYCNVTNLRVSVDLCFIKVEYWGQGTQVTVSS

SEQ ID NO: 10575 - protein, 120 aa, synthetic construct
EVQLVESGGGLVQAGDSLRLSCTASGRGPAVVEMGWFRQAPGKEREFVASISGNTTYTYYADSVKGRFTISRDDARNTVYLQMNSLKPEDTAVYYCNVVMFVTVAFVEYWGQGTQVTVSS

SEQ ID NO: 10576 - protein, 120 aa, synthetic construct
EVQLVESGGGLVQAGDSLRLSCTASGITGGVIEMGWFRQAPGKEREFVASISDAAFYTYYADSVKGRFTISRDDARNTVYLQMNSLKPEDTAVYYCNVTTMSTGGFTEYWGQGTQVTVSS

SEQ ID NO: 10577 - protein, 122 aa, synthetic construct
EVQLVESGGGLVQAGDSLRLSCTASGTGLVHVEMGWFRQAPGKEREFVASISGVRGYTYYADSVKGRFTISRDDARNTVYLQMNSLKPEDTAVYTQRNTYIEIGTMSFLEYWGQGTQVTVSS

SEQ ID NO: 10578 - protein, 119 aa, synthetic construct
EVQLVESGGGLVQAGDSLRLSCTASGCRLVFCPMGWFRQAPGKEREFVASISGFHEDTYYADSVKGRFTISRDDARNTVYLQMNSLKPEDTAVYYCNVAMCIGGSWEYWGQGTQVTVSS

SEQ ID NO: 10579 - protein, 119 aa, synthetic construct
EVQLVESGGGLVQAGDSLRLSCTASGFRIVFLNMGWFRQAPGKEREFVASISDFRGVTYYADSVKGRFTISRDDARNTVYLQMNSLKPEDTAVYYCNVERSHTLAGEYWGQGTQVTVSS

SEQ ID NO: 10580 - protein, 119 aa, synthetic construct
EVQLVESGGGLVQAGDSLRLSCTASGHTAIIIEMGWFRQAPGKEREFVASISGFTEYTYYADSVKGRFTISRDDARNTVYLQMNSLKPEDTAVYYCNVITLNGRFDEYWGQGTQVTVSS

SEQ ID NO: 10581 - protein, 124 aa, synthetic construct
EVQLVESGGGLVQAGDSLRLSCTASVITGHLLEMGWFRQAPGKEREFVASISGNCTYTYYADSVKGRFTISRDDARNTVYLQMNSLKPEDTAVYYCNVTGLDTTPRGFAFFEYWGQGTQVTVSS

SEQ ID NO: 10582 - protein, 120 aa, synthetic construct
EVQLVESGGGLVQAGDSLRLSCTASGRNRGALEMGWFRQAPGKEREFVASISTLTAVTYYADSVKGRFTISRDDARNTVYLQMNSLKPEDTAVYYCNVTCFATGAFLEYWGQGTQVTVSS

SEQ ID NO: 10583 - protein, 120 aa, synthetic construct
EVQLVESGGGLVQAGDSLRLSCTASGTAAAMIEMGWFRQAPGKEREFVASISVRSLGTYYADSVKGRFTISRDDARNTVYLQMNSLKPEDTAVYYCNVTTYGQNSFMEYWGQGTQVTVSS

SEQ ID NO: 10584 - protein, 119 aa, synthetic construct
EVQLVESGGGLVQAGDSLRLSCTASGVREIGIEMGWFRQAPGKEREFVASISFAHGFTYYADSVKGRFTISRDDARNTVYLQMNSLKPEDTAVYYCNVTAWYLKFVEYWGQGTQVTVSS

SEQ ID NO: 10585 - protein, 122 aa, synthetic construct
EVQLVESGGGLVQAGDSLRLSCTASGILSQVVEMGWFRQAPGKEREFVASISGMKLYTYYADSVKGRFTISRDDARNTVYLQMNSLKPEDTAVYYCNVTLLSLGNYHFHEYWGQGTQVTVSS

SEQ ID NO: 10586 - protein, 118 aa, synthetic construct
EVQLVESGGGLVQAGDSLRLSCTASGLRGGIIVMGWFRQAPGKEREFVASISGEWSGTYYADSVKGRFTISRDDARNTVYLQMNSLKPEDTAVYYCNVLQVERWCEYWGQGTQVTVSS

SEQ ID NO: 10587 - protein, 121 aa, synthetic construct
EVQLVESGGGLVQAGDSLRLSCTASGISERILEMGWFRQAPGKEREFVASISEGSQYTYYADSVKGRFTISRDDARNTVYLQMNSLKPEDTAVYYCNVTVIRRFGMLAEYWGQGTQVTVSS

SEQ ID NO: 10588 - protein, 120 aa, synthetic construct
EVQLVESGGGLVQAGDSLRLSCTASGSKTVIVEMGWFRQAPGKEREFVASISGHGRYTYYADSVKGRFTISRDDARNTVYLQMNSLKPEDTAVYYCNVVNVDVCGFVEYWGQGTQVTVSS

SEQ ID NO: 10589 - protein, 117 aa, synthetic construct
EVQLVESGGGLVQAGDSLRLSCTASGGSAARLEMGWFRQAPGKEREFVASISVRTIYTYYADSVKGRFTISRDDARNTVYLQMNSLKPEDTAVYYCNVVDVNFEEYWGQGTQVTVSS

SEQ ID NO: 10590 - protein, 119 aa, synthetic construct
EVQLVESGGGLVQAGDSLRLSCTASGLKGYIMEMGWFRQAPGKEREFVASISVSVLYTYYADSVKGRFTISRDDARNTVYLQMNSLKPEDTAVYYCNVTEVLTGFKEYWGQGTQVTVSS

SEQ ID NO: 10591 - protein, 122 aa, synthetic construct
EVQLVESGGGLVQAGDSLRLSCTASGGITRRIEMGWFRQAPGKEREFVASISVVSVDTYYADSVKGRFTISRDDARNTVYLQMNSLKPEDTAVYYCNVTAFDMVSSRFVEYWGQGTQVTVSS

SEQ ID NO: 10592 - protein, 122 aa, synthetic construct
EVQLVESGGGLVQAGDSLRLSCTASGIAGRVVEMGWFRQAPGKEREFVASISVVNEYTYYADSVKGRFTISRDDARNTVYLQMNSLKPEDTAVYYCNVTSINISRIRFMEYWGQGTQVTVSS

SEQ ID NO: 10593 - protein, 123 aa, synthetic construct
EVQLVESGGGLVQAGDSLRLSCTASGLTTFDGTMGWFRQAPGKEREFVASISSPLPMTYYADSVKGRFTISRDDARNTVYLQMNSLKPEDTAVYYCNVVGIIVAVTIRWVEYWGQGTQVTVSS

SEQ ID NO: 10594 - protein, 121 aa, synthetic construct
EVQLVESGGGLVQAGDSLRLSCTASGDMRRAQHMGWFRQAPGKEREFVASISKHPIGTYYADSVKGRFTISRDDARNTVYLQMNSLKPEDTAVYYCNVLEVICIGLQFEYWGQGTQVTVSS

SEQ ID NO: 10595 - protein, 122 aa, synthetic construct
EVQLVESGGGLVQAGDSLRLSCTASGFVQVPVEMGWFRQAPGKEREFVASISGVGTYTYYADSVKGRFTISRDDARNTVYLQMNSLKPEDTAVYYCNVTVVRWSQPLIIEYWGQGTQVTVSS

SEQ ID NO: 10596 - protein, 120 aa, synthetic construct
EVQLVESGGGLVQAGDSLRLSCTASGYDGTGVEMGWFRQAPGKEREFVASISLLGSYTYYADSVKGRFTISRDDARNTVYLQMNSLKPEDTAVYYCNVTFVRLGMFAEYWGQGTQVTVSS

SEQ ID NO: 10597 - protein, 120 aa, synthetic construct
EVQLVESGGGLVQAGDSLRLSCTASGRMFVFQNMGWFRQAPGKEREFVASISGFHLATYYADSVKGRFTISRDDARNTVYLQMNSLKPEDTAVYYCNVLNVDEVNDLEYWGQGTQVTVSS

SEQ ID NO: 10598 - protein, 122 aa, synthetic construct
EVQLVESGGGLVQAGDSLRLSCTASGWRFVFSVMGWFRQAPGKEREFVASISGFGGMTYYADSVKGRFTISRDDARNTVYLQMNSLKPEDTAVYYCNVDPDSELRISPIEYWGQGTQVTVSS

SEQ ID NO: 10599 - protein, 119 aa, synthetic construct
EVQLVESGGGLVQAGDSLRLSCTASGYLGQIIEMGWFRQAPGKEREFVASISGNHTYTYYADSVKGRFTISRDDARNTVYLQMNSLKPEDTAVYYCNVLSRRELFREYWGQGTQVTVSS

SEQ ID NO: 10600 - protein, 119 aa, synthetic construct
EVQLVESGGGLVQAGDSLRLSCTASGDRIVFNDMGWFRQAPGKEREFVASISGFRTRTYYADSVKGRFTISRDDARNTVYLQMNSLKPEDTAVYYCNVLRSVAEYLEYWGQGTQVTVSS

SEQ ID NO: 10601 - protein, 121 aa, synthetic construct
EVQLVESGGGLVQAGDSLRLSCTASGKDRYAIEMGWFRQAPGKEREFVASISGHAMYTYYADSVKGRFTISRDDARNTVYLQMNSLKPEDTAVYYCNVVVFSHQMGFREYWGQGTQVTVSS

SEQ ID NO: 10602 - protein, 121 aa, synthetic construct
EVQLVESGGGLVQAGDSLRLSCTASGVGVIVLEMGWFRQAPGKEREFVASISGGCDYTYYADSVKGRFTISRDDARNTVYLQMNSLKPEDTAVYYCNVTSLVSLGYIVEYWGQGTQVTVSS

SEQ ID NO: 10603 - protein, 120 aa, synthetic construct
EVQLVESGGGLVQAGDSLRLSCTASGYVTGAIEMGWFRQAPGKEREFVASISMRHGGTYYADSVKGRFTISRDDARNTVYLQMNSLKPEDTAVYYCNVTTVSDFCFKEYWGQGTQVTVSS

SEQ ID NO: 10604 - protein, 120 aa, synthetic construct
EVQLVESGGGLVQAGDSLRLSCTASGNGVGYLEMGWFRQAPGKEREFVASISVHQDYTYYADSVKGRFTISRDDARNTVYLQMNSLKPEDTAVYYCNVLVCSRVRIREYWGQGTQVTVSS

SEQ ID NO: 10605 - protein, 119 aa, synthetic construct
EVQLVESGGGLVQAGDSLRLSCTASGTYVRVIEMGWFRQAPGKEREFVASISTGRFYTYYADSVKGRFTISRDDARNTVYLQMNSLKPEDTAVYYCNVTVLAGNFFEYWGQGTQVTVSS

SEQ ID NO: 10606 - protein, 120 aa, synthetic construct
EVQLVESGGGLVQAGDSLRLSCTASGVGGDMIEMGWFRQAPGKEREFVASISVRGCYTYYADSVKGRFTISRDDARNTVYLQMNSLKPEDTAVYYCNVTSLVVRQFAEYWGQGTQVTVSS

SEQ ID NO: 10607 - protein, 119 aa, synthetic construct
EVQLVESGGGLVQAGDSLRLSCTASGNNGHVVEMGWFRQAPGKEREFVASISGGVLYTYYADSVKGRFTISRDDARNTVYLQMNSLKPEDTAVYYCNVTVFDSGVQEYWGQGTQVTVSS

SEQ ID NO: 10608 - protein, 121 aa, synthetic construct
EVQLVESGGGLVQAGDSLRLSCTASGQVGGVMCMDWFRQAPGKEREFVASISGRMIYTYYADSVKGRFTISRDDARNTVYLQMNSLKPEDTAVYYCNVVLINKGLSFSEYWGQGTQVTVSS

SEQ ID NO: 10609 - protein, 122 aa, synthetic construct
EVQLVESGGGLVQAGDSLRLSCTASGCTDAWIEMGWFRQAPGKEREFVASISGRGEYTYYADSVKGRFTISRDDARNTVYLQMNSLKPEDTAVYYCNVTNFLVNVWRIAEYWGQGTQVTVSS

SEQ ID NO: 10610 - protein, 120 aa, synthetic construct
EVQLVESGGGLVQAGDSLRLSCTASGINGHRIEMGWFRQAPGKEREFVASISGVTAHTYYADSVKGRFTISRDDARNTVYLQMNSLKPEDTAVYYCNVTVLAHMMFREYWGQGTQVTVSS

SEQ ID NO: 10611 - protein, 123 aa, synthetic construct
EVQLVESGGGLVQAGDSLRLSCTASGTAKTLIEMGWFRQAPGKEREFVASISVRMGVTYYADSVKGRFTISRDDARNTVYLQMNSLKPEDTAVYYCNVTGFGGGGQPFFVEYWGQGTQVTVSS

SEQ ID NO: 10612 - protein, 122 aa, synthetic construct
EVQLVESGGGLVQAGDSLRLSCTASGFRYVFRNMGWFRQAPGKEREFVASISGFGLMTYYADSVKGRFTISRDDARNTVYLQMNSLKPEDTAVYYCNVIVSDGVAVATAEYWGQGTQVTVSS

SEQ ID NO: 10613 - protein, 120 aa, synthetic construct
EVQLVESGGGLVQAGDSLRLSCTASGDQSNILEMGWFRQAPGKEREFVASISENVSYTYYADSVKGRFTISRDDARNTVYLQMNSLKPEDTAVYYCNVVTWHVTGFAEYWGQGTQVTVSS

SEQ ID NO: 10614 - protein, 119 aa, synthetic construct
EVQLVESGGGLVQAGDSLRLSCTASGIQDVVVEMGWFRQAPGKEREFVASISGMNAGTYYADSVKGRFTISRDDARNTVYLQMNSLKPEDTAVYYCNVTTVDVVFREYWGQGTQVTVSS

SEQ ID NO: 10615 - protein, 121 aa, synthetic construct
EVQLVESGGGLVQAGDSLRLSCTASGLMGRIMEMGWFRQAPGKEREFVASISGRLVYTYYADSVKGRFTISRDDARNTVYLQMNSLKPEDTAVYYCNVTLVSITGRFREYWGQGTQVTVSS

SEQ ID NO: 10616 - protein, 121 aa, synthetic construct
EVQLVESGGGLVQAGDSLRLSCTASGPITMWLEMGWFRQAPGKEREFVASISGTHVGTYYADSVKGRFTISRDDARNTVYLQMNSLKPEDTAVYYCNVTAIVIPFRLLEYWGQGTQVTVSS

SEQ ID NO: 10617 - protein, 117 aa, synthetic construct
EVQLVESGGGLVQAGDSLRLSCTASGGESHIVIMGWFRQAPGKEREFVASISGARGITYYADSVKGRFTISRDDARNTVYLQMNSLKPEDTAVYYCNVVTSRIREYWGQGTQVTVSS

SEQ ID NO: 10618 - protein, 119 aa, synthetic construct
EVQLVESGGGLVQAGDSLRLSCTASGAGGKVVEMGWFRQAPGKEREFVASISGALVYTYYADSVKGRFTISRDDARNTVYLQMNSLKPEDTAVYYCNVVKFSAGFAEYWGQGTQVTVSS

SEQ ID NO: 10619 - protein, 119 aa, synthetic construct
EVQLVESGGGLVQAGDSLRLSCTASGNRIVFVEMGWFRQAPGKEREFVASISGFRNLTYYADSVKGRFTISRDDARNTVYLQMNSLKPEDTAVYYCNVVKDVRSALEYWGQGTQVTVSS

SEQ ID NO: 10620 - protein, 120 aa, synthetic construct
EVQLVESGGGLVQAGDSLRLSCTASGSLEGALDMGWFRQAPGKEREFVASISLYTVYTYYADSVKGRFTISRDDARNTVYLQMNSLKPEDTAVYYCNVTTIGARGIHEYWGQGTQVTVSS

SEQ ID NO: 10621 - protein, 117 aa, synthetic construct
EVQLVESGGGLVQAGDSLRLSCTASGEGERTMEMGWFRQAPGKEREFVASISSAHMYTYYADSVKGRFTISRDDARNTVYLQMNSLKPEDTAVYYCNVTTLFFREYWGQGTQVTVSS

SEQ ID NO: 10622 - protein, 121 aa, synthetic construct
EVQLVESGGGLVQAGDSLRLSCTASGLVGVVMEMGWFRQAPGKEREFVASISSSDVYTYYADSVKGRFTISRDDARNTVYLQMNSLKPEDTAVYYCNVVTVVRIVGFTEYWGQGTQVTVSS

SEQ ID NO: 10623 - protein, 117 aa, synthetic construct
EVQLVESGGGLVQAGDSLRLSCTASGSGPAAIEMGWFRQAPGKEREFVASISMRSVYTYYADSVKGRFTISRDDARNTVYLQMNSLKPEDTAVYYCNVTTVGFDEYWGQGTQVTVSS

SEQ ID NO: 10624 - protein, 121 aa, synthetic construct
EVQLVESGGGLVQAGDSLRLSCTASGRSDIGVEMGWFRQAPGKEREFVASISWRGTMTYYADSVKGRFTISRDDARNTVYLQMNSLKPEDTAVYYCNVTTFSFETGFLEYWGQGTQVTVSS

SEQ ID NO: 10625 - protein, 117 aa, synthetic construct
EVQLVESGGGLVQAGDSLRLSCTASGHIGGFMEMGWFRQAPGKEREFVASISGRTLYTYYADSVKGRFTISRDDARNTVYLQMNSLKPEDTAVYYCNVTSFMFEEYWCQGTQVTVSS

SEQ ID NO: 10626 - protein, 120 aa, synthetic construct
EVQLVESGGGLVQAGDSLRLSCTASGNGTGVLEMGWFRQAPGKEREFVASISGNGRYTYYADSVKGRFTISRDDARNTVYLQMNSLKPEDTAVYYCNVSLFGAEGLSEYWGQGTQVTVSS

SEQ ID NO: 10627 - protein, 120 aa, synthetic construct
EVQLVESGGGLVQAGDSLRLSCTASGSLVGVMEMGWFRQAPGKEREFVASISVNALYTYYADSVKGRFTISRDDARNTVYLQMNSLKPEDTAVYYCNVTFLRVFRLKEYWGQGTQVTVSS

SEQ ID NO: 10628 - protein, 120 aa, synthetic construct
EVQLVESGGGLVQAGDSLRLSCTASGRKLCVLEMGWFRQAPGKEREFVASISGDSTYTYYADSVKGRFTISRDDARNTVYLQMNSLKPEDTAVYYCNVVIICAGPIIEYWGQGTQVTVSS

SEQ ID NO: 10629 - protein, 122 aa, synthetic construct
EVQLVESGGGLVQAGDSLRLSCTASGVVPVVVEMGWFRQAPGKEREFVASISGVSADTYYADSVKGRFTISRDDARNTVYLQMNSLKPEDTAVYYCNVTLIIHHPVAFVEYWGQGTQVTVSS

SEQ ID NO: 10630 - protein, 122 aa, synthetic construct
EVQLVESGGGLVQAGDSLRLSCTASGCCRFALEMGWFRQAPGKERKFVASISMMGQYTYYADSVKGRFTISRDDARNTVYLQMNSLKPEDTAVYYCNVSGVNRVTRRYLEYWGQGTQVTVSS

SEQ ID NO: 10631 - protein, 121 aa, synthetic construct
EVQLVESGGGLVQAGDSLRLSCTASGSDNLRVEMGWFRQAPGKEREFVASISGRLLDTYYADSVKGRFTISRDDARNTVYLQMNSLKPEDTAVYYCNVTFFALRVGFVEYWGQGTQVTVSS

SEQ ID NO: 10632 - protein, 122 aa, synthetic construct
EVQLVESGGGLVQAGDSLRLSCTASGLVGFIIEMGWFRQAPGKEREFVASISHNSVGTYYADSVKGRFTISRDDARNTVYLQMNSLKPEDTAVYYCNVTTLVSIVMRFAEYWGQGTQVTVSS

SEQ ID NO: 10633 - protein, 120 aa, synthetic construct
EVQLVESGGGLVQAGDSLRLSCTASGKGKAVIEMGWFRQAPGKEREFVASISVRRIYTYYADSVKGRFTISRDDARNTVYLQMNSLKPEDTAVYYCNVSTLRDGGFREYWGQGTQVTVSS

SEQ ID NO: 10634 - protein, 121 aa, synthetic construct
EVQLVESGGGLVQAGDSLRLSCTASGNVPLVLEMGWFRQAPGKEREFVASISGTGSYTYYADSVKGRFTISRDDARNTVYLQMNSLKPEDTAVYYCNVVVVLCVHKFKEYWGQGTQVTVSS

SEQ ID NO: 10635 - protein, 119 aa, synthetic construct
EVQLVESGGGLVQAGDSLRLSCTASGRVGTLLEMGWFRQAPGKEREFVASISGRSSYTYYADSVKGRFTISRDDARNTVYLQMNSLKPEDTAVYYCNVTVIHADVYEYWGQGTQVTVSS

SEQ ID NO: 10636 - protein, 121 aa, synthetic construct
EVQLVESGGGLVQAGDSLRLSCTASGRLVFRIMGWFRQAPGKEREFVASISGFGGLTYYADSVKGRFTISRDDARNTVYLQMNSLKPEDTAVYYCNVSTTIVIGDVEPEYWGQGTQVTVSS

SEQ ID NO: 10637 - protein, 120 aa, synthetic construct
EVQLVESGGGLVQAGDSLRLSCTASGALRQSIEMGWFRQAPGKEREFVASISVRDALTYYADSVKGRFTISRDDARNTVYLQMNSLKPEDTAVYYCNVTMIDSIFIWEYWGQGTQVTVSS

SEQ ID NO: 10638 - protein, 121 aa, synthetic construct
EVQLVESGGGLVQAGDSLRLSCTASGEVDAFIEMGWFRQAPGKEREFVASISATSVYTYYADSVKGRFTISRDDARNTVYLQMNSLKPEDTAVYYCNVTVFSGKAGVLEYWGQGTQVTVSS

SEQ ID NO: 10639 - protein, 120 aa, synthetic construct
EVQLVESGGGLVQAGDSLRLSCTASGHIAIEMVMGWFRQAPGKEREFVASISSVNFSTYYADSVKGRFTISRDDARNTVYLQMNSLKPEDTAVYYCNVIRISSTGWFEYWGQGTQVTVSS

SEQ ID NO: 10640 - protein, 120 aa, synthetic construct
EVQLVESGGGLVQAGDSLRLSCTASGIVSTPIEMGWFRQAPGKEREFVASISGIGEYTYYADSVKGRFTISRDDARNTVYLQMNSLKPEDTAVYYCNVTVINTFRVVEYWGQGTQVTVSS

SEQ ID NO: 10641 - protein, 119 aa, synthetic construct
EVQLVESGGGLVQAGDSLRLSCTASGMFGVVLEMGWFRQAPGKEREFVASISTDLGYTYYADSVKGRFTISRDDARNTVYLQMNSLKPEDTAVYYCNVVTLMNGFTEYWGQGTQVTVSS

SEQ ID NO: 10642 - protein, 120 aa, synthetic construct
EVQLVESGGGLVQAGDSLRLSCTASGEIRGMIEMGWFRQAPGKEREFVASISASDGGTYYADSVKGRFTISRDDARNTVYLQMNSLKPEDTAVYYCNVTLWTVARFREYWGQGTQVTVSS

SEQ ID NO: 10643 - protein, 118 aa, synthetic construct
EVQLVESGGGLVQAGDSLRLSCTASGSRREYMEMGWFRQAPGKEREFVASISGALVYTYYADSVKGRFTISRDDARNTVYLQMNSLKPEDTAVYYCNVTMSRDFVEYWGQGTQVTVSS

SEQ ID NO: 10644 - protein, 124 aa, synthetic construct
EVQLVESGGGLVQAGDSLRLSCTASGLMNIALEMGWFRQAPGKEREFVASISRMGSYTYYADSVKGRFTISRDDARNTVYLQMNSLKPEDTAVYYCNVWTMAVDKYRTIISEYWGQGTQVTVSS

SEQ ID NO: 10645 - protein, 111 aa, synthetic construct
EVQLVESGGGLVQAGDSLRLSCTASGLIDLSKMMGWFRQAPGKEREFVAVYCSVNRTYYADSVKGRFTISRDDARNTVYLQMNSLKPEDTAVYYCNVMEYWGQGTQVTVSS

SEQ ID NO: 10646 - protein, 120 aa, synthetic construct
EVQLVESGGGLVQAGDSLRLSCTASGPSTSVIEMGWFRQAPGKEREFVASISGHGGVTYYADSVKGRFTISRDDARNTVYLQMNSLKPEDTAVYYCNVTSHIRHHFAEYWGQGTQVTVSS

SEQ ID NO: 10647 - protein, 121 aa, synthetic construct
EVQLVESGGGLVQAGDSLRLSCTASGSCQVFLELGWFRQAPGKEREFVASISGNDSATYYADSVKGRFTISRDDARNTVYLQMNSLKPEDTAVYYCNVVVIGRDLRFLEYWGQGTQVTVSS

SEQ ID NO: 10648 - protein, 119 aa, synthetic construct
EVQLVESGGGLVQAGDSLRLSCTASGSKGSAIEMGWFRQAPGKEREFVASISSDVHYTYYADSVKGRFTISRDDARNTVYLQMNSLKPEDTAVYYCNMCVFNSMFAEYWGQGTQVTVSS

SEQ ID NO: 10649 - protein, 114 aa, synthetic construct
EVQLVESGGGLVQAGDSLRLSCTASGVCRLIRFMGWFRQAPGKEREFVASISCDTGHTYYADSVKGRFTISRDDARNTVYLQMNSLKPEDTAVYYCNVFWPEYWGQGTQVTVSS

SEQ ID NO: 10650 - protein, 121 aa, synthetic construct
EVQLVESGGGLVQAGDSLRLSCTASGMTGRSLEMGWFRQAPGKEREFVASISGTLLYTYYADSVKGRFTISRDDARNTVYLQMNSLKPEDTAVYYCNVSVVVIGGRIEEYWGQGTQVTVSS

SEQ ID NO: 10651 - protein, 119 aa, synthetic construct
EVQLVESGGGLVQAGDSLRLSCTASGSRLSVIEMGWFRQAPGKEREFVASISGTKVYTYYADSVKGRFTISRDDARNTVYLQMNSLKPEDTAVYYCNVCVVDRGFLEYWGQGTQVTVSS

SEQ ID NO: 10652 - protein, 120 aa, synthetic construct
EVQLVESGGGLVQAGDSLRLSCTASGYVVLVLEMGWFRQAPGKEREFVASISGVDTYTYYADSVKGRFTISRDDARNTVYLQMNSLKPEDTAVYYCNVTVLGTRHLVEYWGQGTQVTVSS

SEQ ID NO: 10653 - protein, 120 aa, synthetic construct
EVQLVESGGGLVQAGDSLRLSCTASGNKQGSVEMGWFRQAPGKEREFVASISMLRRYTYYADSVKGRFTISRDDARNTVYLQMNSLKPEDTAVYYCNVTHLDVKGMQEYWGQGTQVTVSS

SEQ ID NO: 10654 - protein, 121 aa, synthetic construct
EVQLVESGGGLVQAGDSLRLSCTASGCESGAIEMGWFRQAPGKEREFVASISVHMDYTYYADSVKGRFTISRDDARNTVYLQMNSLKPEDTAVYYCNVSTLVTGTGIREYWGQGTQVTVSS

SEQ ID NO: 10655 - protein, 120 aa, synthetic construct
EVQLVESGGGLVQAGDSLRLSCTASGNINHSVEMGWFRQAPGKEREFVASISGRTSYTYYADSVKGRFTISRDDARNTVYLQMNSLKPEDTAVYYCNVTCLIRGGFREYWGQGTQVTVSS

SEQ ID NO: 10656 - protein, 120 aa, synthetic construct
EVQLVESGGGLVQAGDSLRLSCTASGRRKLVVEMGWFRQAPGKEREFVASISADSRYTYYADSVKGRFTISRDDARNTVYLQMNSLKPEDTAVYYCNVTFLEMYGFIEYWGQGTQVTVSS

SEQ ID NO: 10657 - protein, 119 aa, synthetic construct
EVQLVESGGGLVQAGDSLRLSCTASGEGTKAIEMGWFRQAPGKEREFVASISVNDVGTYYADSVKGRFTISRDDARNTVYLQMNSLKPEDTAVYYCNVTYFTGMFEEYWGQGTQVTVSS

SEQ ID NO: 10658 - protein, 119 aa, synthetic construct
EVQLVESGGGLVQAGDSLRLSCTASGVVGFVIEMGWFRQAPGKEREFVASISPHRLYTYYADSVKGRFTISRDDARNTVYLQMNSLKPEDTAVYYCNVTTCDSNVVEYWGQGTQVTVSS

SEQ ID NO: 10659 - protein, 123 aa, synthetic construct
EVQLVESGGGLVQAGDSLRLSCTASGESGCIRVMGWFRQAPGKEREFVAISMASGWTYYADSVKGRFTISRDDARNTVYLQMNSLKPEDTAVYYCNVERVPESQADIPCLEYWGQGTQVTVSS

SEQ ID NO: 10660 - protein, 121 aa, synthetic construct
EVQLVESGGGLVQAGDSLRLSCTASGHSLRVLEMGWFRQAPGKEREFVASISVSCHYTYYADSVKGRFTISRDDARNTVYLQMNSLKPEDTAVYYCNVVIIGPTWRLLEYWGQGTQVTVSS

SEQ ID NO: 10661 - protein, 120 aa, synthetic construct
EVQLVESGGGLVQAGDSLRLSCTASGGIGTIMEMGWFRQAPGKEREFVASISGRSKLTYYADSVKGRFTISRDDARNTVYLQMNSLKPEDTAVYYCNVTVTVAHYFDEYWGQGTQVTVSS

SEQ ID NO: 10662 - protein, 120 aa, synthetic construct
EVQLVESGGGLVQAGDSLRLSCTASGRMVLVVEMGWFRQAPGKEREFVASISEKDRLTYYADSVKGRFTISRDDARNTVYLQMNSLKPEDTAVYYCNVTTFDDVNFREYWGQGTQVTVSS

SEQ ID NO: 10663 - protein, 120 aa, synthetic construct
EVQLVESGGGLVQAGDSLRLSCTASGSNEFMLEMGWFRQAPGKEREFVASISVWHGWTYYADSVKGRFTISRDDARNTVYLQMNSLKPEDTAVYYCNVSTLLRRGLIEYWGQGTQVTVSS

SEQ ID NO: 10664 - protein, 120 aa, synthetic construct
EVQLVESGGGLVQAGDSLRLSCTASGDAKWIIEMGWFRQAPGKEREFVASISGNRFYTYYADSVKGRFTISRDDARNTVYLQMNSLKPEDTAVYYCNVVIISRCEIMEYWGQGTQVTVSS

SEQ ID NO: 10665 - protein, 121 aa, synthetic construct
EVQLVESGGGLVQAGDSLRLSCTASGGMEGAMEMGWFRQAPGKEREFVASISVRFGDTYYADSVKGRFTISRDDARNTVYLQMNSLKPEDTAVYYCNVCVFHTVNFFVEYWGQGTQVTVSS

SEQ ID NO: 10666 - protein, 119 aa, synthetic construct
EVQLVESGGGLVQAGDSLRLSCTASGRVIGIVEMGWFRQAPGKEREFVASISGDTIYTYYADSVKGRFTISRDDARNTVYLQMNSLKPEDTAVYYCNVTMIELSFREYWGQGTQVTVSS

SEQ ID NO: 10667 - protein, 124 aa, synthetic construct
EVQLVESGGGLVQAGDSLRLSCTASGFRHCFLKMGWFRQAPGKEREFVASISGFNGVTYYADSVKGRFTISRDDARNTVYLQMNSLKPEDTAVYYCNVMRGIDESTLPMHFEYWGQGTQVTVSS

SEQ ID NO: 10668 - protein, 121 aa, synthetic construct
EVQLVESGGGLVQAGDSLRLSCTASGIGQVFVEMGWFRQAPGKEREFVASISKSVGYTYYADSVKGRFTISRDDARNTVYLQMNSLKPEDTAVYYCNVTVLTEVSGFSEYWGQGTQVTVSS

SEQ ID NO: 10669 - protein, 119 aa, synthetic construct
EVQLVESGGGLVQAGDSLRLSCTASGRTLRVIEMGWFRQAPGKEREFVASISVEDDYTYYADSVKGRFTISRDDARNTVYLQMNSLKPEDTAVYYCNVTALVMRFTEYWGQGTQVTVSS

SEQ ID NO: 10670 - protein, 120 aa, synthetic construct
EVQLVESGGGLVQAGDSLRLSCTASGVSGGGIEMGWFRQAPGKEREFVASISVRYAWTYYADSVKGRFTISRDDARNTVYLQMNSLKPEDTAVYYCNVSCLGAFRFMEYWGQGTQVTVSS

SEQ ID NO: 10671 - protein, 121 aa, synthetic construct
EVQLVESGGGLVQAGDSLRLSCTASGEPGVMLMMGWFRQAPGKEREFVASISGRSETTYYADSVKGRFTISRDDARNTVYLQMNSLKPEDTAVYYCNVQHYNYDWNFGEYWGQGTQVTVSS

SEQ ID NO: 10672 - protein, 117 aa, synthetic construct
EVQLVESGGGLVQAGDSLRLSCTASGKAGSVPIMGWFRQAPGKEREFVASISGVLNVTYYADSVKGRFTISRDDARNTVYLQMNSLKPEDTAVYYCNVVTCRIMEYWGQGTQVTVSS

SEQ ID NO: 10673 - protein, 119 aa, synthetic construct
EVQLVESGGGLVQAGDSLRLSCTASGNGMIVMGWFRQAPGKEREFVASISIVRGSTYYADSVKGRFTISRDDARNTVYLQMNSLKPEDTAVYYCNVLIHNHVAPWQEYWGQGTQVTVSS

SEQ ID NO: 10674 - protein, 119 aa, synthetic construct
EVQLVESGGGLVQAGDSLRLSCTASGWAIILEMGWFRQAPGKEREFVASISDRERYTYYADSVKGRFTISRDDARNTVYLQMNSLKPEDTAVYYCNVVVIVDNRFVEYWGQGTQVTVSS

SEQ ID NO: 10675 - protein, 121 aa, synthetic construct
EVQLVESGGGLVQAGDSLRLSCTASGDIERVIEMGWFRQAPGKEREFVASISYMYGMTYYADSVKGRFTISRDDARNTVYLQMNSLKPEDTAVYYCNVTVVSAMMSFVEYWGQGTQVTVSS

SEQ ID NO: 10676 - protein, 121 aa, synthetic construct
EVQLVESGGGLVQAGDSLRLSCTASGQVDGVLEMGWFRQAPGKEREFVASISGALVYTYYADSVKGRFTISRDDARNTVYLQMNSLKPEDTAVYYCNVTTIGNLGHPREYWGQGTQVTVSS

SEQ ID NO: 10677 - protein, 119 aa, synthetic construct
EVQLVESGGGLVQAGDSLRLSCTASGAIRGILEMGWFRQAPGKEREFVASISTRSVYTYYADSVKGRFTISRDDARNTVYLQMNSLKPEDTAVYYCNVMHVGMGINEYWGQGTQVTVSS

SEQ ID NO: 10678 - protein, 119 aa, synthetic construct
EVQLVESGGGLVQAGDSLRLSCTASGMVAMATRMGWFRQAPGKEREFVASISMANFTTYYADSVKGRFTISRDDARNTVYLQMNSLKPEDTAVYYCNVLLLAGGWHEYWGQGTQVTVSS

SEQ ID NO: 10679 - protein, 120 aa, synthetic construct
EVQLVESGGGLVQAGDSLRLSCTASGDDDRLLEMGWFRQAPGKEREFVASISVRTMYTYYADSVKGRFTISRDDARNTVYLQMNSLKPEDTAVYYCNVTAVMGHSIVEYWGQGTQVTVSS

SEQ ID NO: 10680 - protein, 124 aa, synthetic construct
EVQLVESGGGLVQAGDSLRLSCTASGVRHVPLEMGWFRQAPGKEREFVASISMIGVYTYYADSVKGRFTISRDDARNTVYLQMNSLKPEDTAVYYCNVTIVIGPLMKAKIEEYWGQGTQVTVSS

SEQ ID NO: 10681 - protein, 120 aa, synthetic construct
EVQLVESGGGLVQAGDSLRLSCTASGVPTSFMEMGWFRQAPGKEREFVASISGHTRYTYYADSVKGRFTISRDDARNTVYLQMNSLKPEDTAVYYCNVCALGINGKEEYWGQGTQVTVSS

SEQ ID NO: 10682 - protein, 117 aa, synthetic construct
EVQLVESGGGLVQAGDSLRLSCTASGRMADFVIMGWFRQAPGKEREFVASISGAKGWTYYADSVKGRFTISRDDARNTVYLQMNSLKPEDTAVYYCNVVSIRIIEYWGQGTQVTVSS

SEQ ID NO: 10683 - protein, 122 aa, synthetic construct
EVQLVESGGGLVQAGDSLRLSCTASGNIDNILEMGWFRQAPGKEREFVASISNRGGGTYYADSVKGRFTISRDDARNTVYLQMNSLKPEDTAVYYCNVTSIHVFGHVFIEYWGQGTQVTVSS

SEQ ID NO: 10684 - protein, 121 aa, synthetic construct
EVQLVESGGGLVQAGDSLRLSCTASGRCPGVLEMGWFRQAPGKEREFVASISGVSMYTYYADSVKGRFTISRDDARNTVYLQMNSLKPEDTAVYYCNVWAIIENINFVEYWGQGTQVTVSS

SEQ ID NO: 10685 - protein, 122 aa, synthetic construct
EVQLVESGGGLVQAGDSLRLSCTASGIGGQILEMGWFRQAPGKEREFVASISASVLYTYYADSVKGRFTISRDDARNTVYLQMNSLKPEDTAVYYCNVTCWKTRAEKMLEYWGQGTQVTVSS

SEQ ID NO: 10686 - protein, 119 aa, synthetic construct
EVQLVESGGGLVQAGDSLRLSCTASGRILGVLEMGWFRQAPGKEREFVASISYRYDQTYYADSVKGRFTISRDDARNTVYLQMNSLKPEDTAVYYCNVTALVIAKKEYWGQGTQVTVSS

SEQ ID NO: 10687 - protein, 123 aa, synthetic construct
EVQLVESGGGLVQAGDSLRLSCTASGVGAFILEMGWFRQAPGKEREFVASISANHRGTYYADSVKGRFTISRDDARNTVYLQMNSLKPEDTAVYYCNVTVIHAGMYGGFGEYWGQGTQVTVSS

SEQ ID NO: 10688 - protein, 119 aa, synthetic construct
EVQLVESGGGLVQAGDSLRLSCTASGGNVGRVVMGWFRQAPGKEREFVASISDVVEMTYYADSVKGRFTISRDDARNTVYLQMNSLKPEDTAVYYCNVKAFAHRFFEYWGQGTQVTVSS

SEQ ID NO: 10689 - protein, 124 aa, synthetic construct
EVQLVESGGGLVQAGDSLRLSCTASGMRLVFRNMGWFRQAPGKEREFVASISDFRDSTYYADSVKGRFTISRDDARNTVYLQMNSLKPEDTAVYYCNVLASLMGITDWSGMEYWGQGTQVTVSS

SEQ ID NO: 10690 - protein, 120 aa, synthetic construct
EVQLVESGGGLVQAGDSLRLSCTASGIGVHSIEMGWFRQAPGKEREFVASISTVGADTYYADSVKGRFTISRDDARNTVYLQMNSLKPEDTAVYYCNVTAYRARHFHEYWGQGTQVTVSS

SEQ ID NO: 10691 - protein, 124 aa, synthetic construct
EVQLVESGGGLVQAGDSLRLSCTASGKVASKLEMGWFRQAPGKEREFVASISGFCDYTYYADSVKGRFTISRDDARNTVYLQMNSLKPEDTAVYYCNVTAIVVKVAVANIVEYWGQGTQVTVSS

SEQ ID NO: 10692 - protein, 119 aa, synthetic construct
EVQLVESGGGLVQAGDSLRLSCTASGSMVKALEMGWFRQAPGKEREFVASISARSGGTYYADSVKGRFTISRDDARNTVYLQMNSLKPEDTAVYYCNVTVIDDKVREYWGQGTQVTVSS

SEQ ID NO: 10693 - protein, 123 aa, synthetic construct
EVQLVESGGGLVQAGDSLRLSCTASGGIGTALEMGWFRQAPGKEREFVSSISGRKVYTYYADSVKGRFTISRDDARNTVYLQMNSLKPEDTAVYYCNVIAVVPWLERVFMEYWGQGTQVTVSS

SEQ ID NO: 10694 - protein, 121 aa, synthetic construct
EVQLVESGGGLVQAGDSLRLSCTASGGVRQLIEMGWFRQAPGKEREFVASISSRERYTYYADSVKGRFTISRDDARNTVYLQMNSLKPEDTAVYYCNVVMLFSVMGFVEYWGQGTQVTVSS

SEQ ID NO: 10695 - protein, 124 aa, synthetic construct
EVQLVESGGGLVQAGDSLRLSCTASGAKVLVLEMGWFRQAPGKEREFVASISGDSEYTYYADSVKGRSTISRDDARNTVYLQMNSLKPEDTAVYYCNVTVGHRMMRSLYILEYWGQGTQVTVSS

SEQ ID NO: 10696 - protein, 121 aa, synthetic construct
EVQLVESGGGLVQAGDSLRLSCTASGLASSWLEMGWFRQAPGKEREFVASISFSHDATYYADSVKGRFTISRDDARNTVYLQMNSLKPEDTAVYYCNVTVFTMVVMLKEYWGQGTQVTVSS

SEQ ID NO: 10697 - protein, 123 aa, synthetic construct
EVQLVESGGGLVQAGDSLRLSCTASGMVSEILEMGWFRQAPGKEREFVASISGQNRYTYYADSVKGRFTISRDDARNTVYLQMNSLKPEDTAVYYCNVVFIKLGRIHIFGEYWGQGTQVTVSS

SEQ ID NO: 10698 - protein, 123 aa, synthetic construct
EVQLVESGGGLVQAGDSLRLSCTASGRVIVFRDMGWFRQAPGKEREFVASISWTWQETYYADSVKGRFTISRDDARNTVYLQMNSLKPEDTAVYYCNVSPYGLTRGLIRQEYWGQGTQVTVSS

SEQ ID NO: 10699 - protein, 121 aa, synthetic construct
EVQLVESGGGLVQAGDSLRLSCTASGDVRTVVEMGWFRQAPGKEREFVASISGITVATYYADSVKGRFTISRDDARNTVYLQMNSLKPEDTAVYYCNVTTWGFEFNFMEYWGQGTQVTVSS

SEQ ID NO: 10700 - protein, 119 aa, synthetic construct
EVQLVESGGGLVQAGDSLRLSCTASGTDEDAIEMGWFRQAPGKEREFVASISIRRGCTYYADSVKGRFTISRDDARNTVYLQMNSLKPEDTAVYYCNVTVWKTMFDEYWGQGTQVTVSS

SEQ ID NO: 10701 - protein, 120 aa, synthetic construct
EVQLVESGGGLVQAGDSLRLSCTASGRWMILVEMGWFRQAPGKEREFVASISGTRCSTYYADSVKGRFTISRDDARNTVYLQMNSLKPEDTAVYYCNVTTVNINGFKEYWGQGTQVTVSS

SEQ ID NO: 10702 - protein, 123 aa, synthetic construct
EVQLVESGGGLVQAGDSLRLSCTASGDQDNVVEMGWFRQAPGKEREFVASISARWCYTYYADSVKGRFTISRDDARNTVYLQMNSLKPEDTAVYYCNVTVVRLRDFGTFREYWGQGTQVTVSS

SEQ ID NO: 10703 - protein, 120 aa, synthetic construct
EVQLVESGGGLVQAGDSLRLSCTASGCLGYLIEMGWFRQAPGKEREFVASISNGVGYTYYADSVKGRFTISRDDARNTVYLQMNSLKPEDTAVYYCNVSGLQTSTIIEYWGQGTQVTVSS

SEQ ID NO: 10704 - protein, 118 aa, synthetic construct
EVQLVESGGGLVQAGDSLRLSCTASGVPSRAMEMGWFRQAPGKEREFVASISVHRNYTYYADSVKGRFTISRDDARNTVYLQMNSLKPEDTAVYYCNVACVSHPREYWGQGTQVTVSS

SEQ ID NO: 10705 - protein, 119 aa, synthetic construct
EVQLVESGGGLVQAGDSLRLSCTASGVRIVFIGMGWFRQAPGKEREFVASISGVRGQTYYADSVKGRFTISRDDARNTVYLQMNSLKPEDTAVYYCNVADGLSMVNEYWGQGTQVTVSS

SEQ ID NO: 10706 - protein, 119 aa, synthetic construct
EVQLVESGGGLVQAGDSLRLSCTASGRHDDVLEMGWFRQAPGKEREFVASISGRGMATYYADSVKGRFTISRDDARNTVYLQMNSLKPEDTAVYYCNVTVFDVLKVEYWGQGTQVTVSS

SEQ ID NO: 10707 - protein, 117 aa, synthetic construct
EVQLVESGGGLVQAGDSLRLSCTASGQRIVCVGMGWFRQAPGKEREFVASISGFHSATYYADSVKGRFTISRDDARNTVYLQMNSLKPEDTAVYYCNVADTDIVEYWGQGTQVTVSS

SEQ ID NO: 10708 - protein, 120 aa, synthetic construct
EVQLVESGGGLVQAGDSLRLSCTASGSWNRLMEMGWFRQAPGKEREFVASISDGHLVTYYADSVKGRFTISRDDARNTVYLQMNSLKPEDTAVYYCNVWTVHNTGFDEYWGQGTQVTVSS

SEQ ID NO: 10709 - protein, 124 aa, synthetic construct
EVQLVESGGGLVQAGDSLRLSCTASGIRFVFRLMGWFRQAPGKEREFVASISGTNGVTYYADSVKGRFTISRDDARNTVYLQMNSLKPEDTAVYYCNVGPVMGCSTSVLYLEYWGQGTQVTVSS

SEQ ID NO: 10710 - protein, 120 aa, synthetic construct
EVQLVESGGGLVQAGDSLRLSCTASGMSFSVIEMGWFRQAPGKEREFVASISRLYVYTYYADSVKGRFTISRDDARNTVYLQMNSLKPEDTAVYYCNVVGMTGAKFLEYWGQGTQVTVSS

SEQ ID NO: 10711 - protein, 121 aa, synthetic construct
EVQLVESGGGLVQAGDSLRLSCTASGGIGVAIDMGWFRQAPGKEREFVASISTQRIYTYYADSVKGRFTISRDDARNTVYLQMNSLKPEDTAVYYCNVTTWSRNVGIEEYWGQGTQVTVSS

SEQ ID NO: 10712 - protein, 120 aa, synthetic construct
EVQLVESGGGLVQAGDSLRLSCTASGLRGSWMEMGWFRQAPGKEREFVASISGVREYTYYADSVKGRFTISRDDARNTVYLQMNSLKPEDTAVYYCNVSVVLVYRVLEYWGQGTQVTVSS

SEQ ID NO: 10713 - protein, 123 aa, synthetic construct
EVQLVESGGGLVQAGDSLRLSCTASGRMDYILEMGWFRQAPGKEREFVASISHSVGYTYYADSVKGRFTISRDDARNTVYLQMNSLKPEDTAVYYCNVLVFEQVGLGGFVEYWGQGTQVTVSS

SEQ ID NO: 10714 - protein, 120 aa, synthetic construct
EVQLVESGGGLVQAGDSLRLSCTASGVFQDILEMGWFRQAPGKEREFVASISGDRMYTYYADSVKSRFTISRDDARNTVYLQMNSLKPEDTAVYYCNVVLIICHMFIEYWGQGTQVTVSS

SEQ ID NO: 10715 - protein, 119 aa, synthetic construct
EVQLVESGGGLVQAGDSLRLSCTASGDMMSMVEMGWFRQAPGKEREFVASISSRDSETYYADSVKGRFTISRDDARNTVYLQMNSLKPEDTAVYYCNVTVFHIMFAEYWGQGTQVTVSS

SEQ ID NO: 10716 - protein, 117 aa, synthetic construct
EVQLVESGGGLVQAGDSLRLSCTASGRFDRAMEMGWFRQAPGKEREFVASISVTQEYTYYADSVKGRFTISRDDARNTVYLQMNSLKPEDTAVYYCNVVNMRFEEYWGQGTQVTVSS

SEQ ID NO: 10717 - protein, 121 aa, synthetic construct
EVQLVESGGGLVQAGDSLRLSCTASGLGGDGLLMDWFRQAPGKEREFVASISMHKRYTYYADSVKGRFTISRDDARNTVYLQMNSLKPEDTAVYYCNVVRISLEVGIVEYWGQGTQVTVSS

SEQ ID NO: 10718 - protein, 120 aa, synthetic construct
EVQLVESGGGLVQAGDSLRLSCTASGLRKFVVEMGWFRQAPGKEREFVASISGIGDETYYADSVKGRFTISRDDARNTVYLQMNSLKPEDTAVYYCNVTSLGWCGFEEYWGQGTQVTVSS

SEQ ID NO: 10719 - protein, 122 aa, synthetic construct
EVQLVESGGGLVQAGDSLRLSCTASGCTRGMLEMGWFRQAPGKEREFVASISVRGVYTYYADSVKGRFTISRDDARNTVYLQMNSLKPEDTAVYYCNVTTLVTDRMVIAEYWGQGTQVTVSS

SEQ ID NO: 10720 - protein, 125 aa, synthetic construct
EVQLVESGGGLVQAGDSLRLSCTASGPDITIIEMGWFRQAPGKEREFVASISNSDHYTYYADSVKGRFTISRDDARNTVYLQMNSLKPEDTAVYYCNVSGFSMRPGVRLAKGEYWGQGTQVTVSS

SEQ ID NO: 10721 - protein, 120 aa, synthetic construct
EVQLVESGGGLVQAGDSLRLSCTASGKTPAILLMGWFRQAPGKEREFVASISWRGFYTYYADSVKGRFTISRDDARNTVYLQMNSLKPEDTAVYYCNVVTVSVGLFQEYWGQGTQVTVSS

SEQ ID NO: 10722 - protein, 120 aa, synthetic construct
EVQLVESGGGLVQAGDSLRLSCTASGITLLAMEMGWFRQAPGKEREFVASISGGQRYTYYADSVKGRFTISRDDARNTVYLQMNSLKPEDTAVYYCNVTVFQLMRITEYWGQGTQVTVSS

SEQ ID NO: 10723 - protein, 115 aa, synthetic construct
EVQLVESGGGLVQAGDSLRLSCTASGYIEMGWFRQAPGKEREFVASISGYRESTYYADSVKGRFTISRDDARNTVYLQMNSLKPEDTAVYYCNVVTFARRFVEYWGQGTQVTVSS

SEQ ID NO: 10724 - protein, 120 aa, synthetic construct
EVQLVESGGGLVQAGDSLRLSCTASGRRGAWMEMGWFRQAPGKEREFVASISVVGLYTYYADSVKGRFTISRDDARNTVYLQMNSLKPEDTAVYYCNATVVKGQSIAEYWGQGTQVTVSS

SEQ ID NO: 10725 - protein, 120 aa, synthetic construct
EVQLVESGGGLVQAGDSLRLSCTASGNAPGQLEMGWFRQAPGKEREFVASISGISLYTYYADSVKGRFTISRDDARNTVYLQMNSLKPEDTAVYYCNVTSVRSGAFMEYWGQGTQVTVSS

SEQ ID NO: 10726 - protein, 119 aa, synthetic construct
EVQLVESGGGLVQAGDSLRLSCTASGLCGGVMEMGWFRRAPGKEREFVASISGLGRYTYYADSVKGRFTISRDDARNTVYLQMNSLKPEDTAVYYCNVWVVKGQVSEYWGQGTQVTVSS

SEQ ID NO: 10727 - protein, 121 aa, synthetic construct
EVQLVESGGGLVQAGDSLRLSCTASGVRGGLVEMGWFRQAPGKEREFVASISAREAYTYYADSVKGRFTISRDDARNTVYLQMNSLKPEDTAVYYCNVIVILAIVSFVEYWGQGTQVTVSS

SEQ ID NO: 10728 - protein, 124 aa, synthetic construct
EVQLVESGGGLVQAGDSLRLSCTASGDVVYVLEMGWFRQAPGKEREFVASISGAGQYTYYADSVKGRFTISRDDARNTVYLQMNSLKPEDTAVYYCNVSFIKGINVGVRLEEYWGQGTQVTVSS

SEQ ID NO: 10729 - protein, 122 aa, synthetic construct
EVQLVESGGGLVQAGDSLRLSCTASGGGTNIIEMGWFRQAPGKEREFVASISKTLLYTYYADSVKGRFTISRDDARNTVYLQMNSLKPEDTAVYYCNVVGISSLVRRFVEYWGQGTQVTVSS

SEQ ID NO: 10730 - protein, 122 aa, synthetic construct
EVQLVESGGGLVQAGDSLRLSCTASGCKKKMLEMGWFRQAPGKEREFVASISCQVYYTYYADSVKGRFTISRDDARNTVYLQMNSLKPEDTAVYYCNVTSMVGFPVSIVEYWGQGTQVTVSS

SEQ ID NO: 10731 - protein, 120 aa, synthetic construct
EVQLVESGGGLVQAGDSLRLSCTASGTDAGMIEMGWFRQAPGKEREFVASISVVGWYTYYADSVKGRFTISRDDARNTVYLQMNSLKPEDTAVYYCNVTVYDRRALREYWGQGTQVTVSS

SEQ ID NO: 10732 - protein, 121 aa, synthetic construct
EVQLVESGGGLVQAGDSLRLSCTASGIVARIIEMGWFRQAPGKEREFVASISGFGIYTYYADSVKGRFTISRDDARNTVYLQMNSLKPEDTAVYYCNVIHVEGLAAVVEYWGQGTQVTVSS

SEQ ID NO: 10733 - protein, 119 aa, synthetic construct
EVQLVESGGGLVQAGDSLRLSCTASGKLVEVIEMGWFRQAPGKEREFVASISGGALYTYYADSVKGRFTISRDDARNTVYLQMNSLKPEDTAVYYCNVLVVNKLIMEYWGQGTQVTVSS

SEQ ID NO: 10734 - protein, 120 aa, synthetic construct
EVQLVESGGGLVQAGDSLRLSCTASGNHRGVLEMGWFRQAPGKEREFVASISMRMTYTYYADSVKGRFTISRDDARNTVYLQMNSLKPEDTAVYYCNVLSVDGIKVVEYWGQGTQVTVSS

SEQ ID NO: 10735 - protein, 120 aa, synthetic construct
EVQLVESGGGLVQAGDSLRLSCTASGKATNRVEMGWFRQAPGKEREFVASISSMNAYTYYADSVKGRFTISRDDARNTVYLQMNSLKPEDTAVYYCNVVMIGNASFVEYWGQGTQVTVSS

SEQ ID NO: 10736 - protein, 117 aa, synthetic construct
EVQLVESGGGLVQAGDSLRLSCTASGVYKVCGKMGWFRQAPGKEREFVASISMRMVETYYADSVKGRFTISRDDARNTVYLQMNSLKPEDTAVYYCNVEIVREWEYWGQGTQVTVSS

SEQ ID NO: 10737 - protein, 120 aa, synthetic construct
EVQLVESGGGLVQAGDSLRLSCTASGAVDGFVEMGWFRQAPGKEREFVASISETGAYTYYADSVKGRFTISRDDARNTVYLQMNSLKPEDTAVYYCNVAVWLSRSFREYWGQGTQVTVSS

SEQ ID NO: 10738 - protein, 121 aa, synthetic construct
EVQLVESGGGLVQAGDSLRLSCTASGIEGPAIEMGWFRQAPGKEREFVASISWGCGYTYYADSVKGRFTISRDDARNTVYLQMNSLKPEDTAVYYCNVTHMNVELLRREYWGQGTQVTVSS

SEQ ID NO: 10739 - protein, 120 aa, synthetic construct
EVQLVESGGGLVQAGDSLRLSCTASGRARLVLEMGWFRQAPGKEREFVASISWLRCETYYADSVKGRFTISRDDARNTVYLQMNSLKPEDTAVYYCNVTAHEGWMFHEYWGQGTQVTVSS

SEQ ID NO: 10740 - protein, 121 aa, synthetic construct
EVQLVESGGGLVQAGDSLRLSCTASGVNGLVLEMGWFRQAPGKEREFVASISRVGTYTYYADSVKGRFTISRDDARNTVYLQMNSLKPEDTAVYYCNVVVHTHDLVFVEYWGQGTQVTVSS

SEQ ID NO: 10741 - protein, 120 aa, synthetic construct
EVQLVESGGGLVQAGDSLRLSCTASGQSHILLEMGWFRQAPGKEREFVASISMIDGGTYYADSVKGRFTISRDDARNTVYLQMNSLKPEDTAVYYCNVTVFREATFMEYWGQGTQVTVSS

SEQ ID NO: 10742 - protein, 120 aa, synthetic construct
EVQLVESGGGLVQAGDSLRLSCTASGTVHPLLEMGWFRQAPGKEREFVASISLGGHYTYYADSVKGRFTISRDDARNTVYLQMNSLKPEDTAVYYCNVTMVRLSMFVEYWGQGTQVTVSS

SEQ ID NO: 10743 - protein, 121 aa, synthetic construct
EVQLVESGGGLVQAGDSLRLSCTASGDCRSVIEMGWFRQAPGKEREFVASISVNSTYTYYADSVKGRFTISRDDARNTVYLQMNSLKPEDTAVYYCNVTGFSRTLSRGEYWGQGTQVTVSS

SEQ ID NO: 10744 - protein, 119 aa, synthetic construct
EVQLVESGGGLVQAGDSLRLSCTASGKVSAMLEMGWFRQAPGKEREFVASISAGVNYTYYADPVKGRFTISRDDARNTVYLQMNSLKPEDTAVYYCNVTAIMGRFIEYWGQGTQVTVSS

SEQ ID NO: 10745 - protein, 120 aa, synthetic construct
EVQLVESGGGLVQAGDSLRLSCTASGTGNETIEMGWFRQAPGKEREFVASISGKSDHTYYADSVKGRFTISRDDARNTVYLQMNSLKPEDTAVYYCNVTYLTTGMFQEYWGQGTQVTVSS

SEQ ID NO: 10746 - protein, 117 aa, synthetic construct
EVQLVESGGGLVQAGDSLRLSCTASGNHAMLIEMGWFRQAPGKEREFVASISGFHQDTYYADSVKGRFTISRDDARNTVYLQMNSLKPEDTAVYYCNVGWCTPKEYWGQGTQVTVSS

SEQ ID NO: 10747 - protein, 121 aa, synthetic construct
EVQLVESGGGLVQAGDSLRLSCTASGRSCDPLEMGWFRQAPGKEREFVASISMRMIYTYYADSVKGRFTISRDDARNTVYLQMNSLKPEDTAVYYNFAVCLGGLDFVGEYWGQGTQVTVSS

SEQ ID NO: 10748 - protein, 121 aa, synthetic construct
EVQLVESGGGLVQAGDSLRLSCTASGPAVDVIEMGWFRQAPGKEREFVASISKHMRSTYYADSVKGRFTISRDDARNTVYLQMNSLKPEDTAVYYCRRSAITNALGLKEYWGQGTQVTVSS

SEQ ID NO: 10749 - protein, 120 aa, synthetic construct
EVQLVESGGGLVQAGDSLRLSCTASGPADGSVEMGWFRQAPGKERKFVASISVRFYATYYADSVKGRFTISRDDARNTVYLQMNSLKPEDTAVYYCNVTRWGKDGFQEYWGQGTQVTVSS

SEQ ID NO: 10750 - protein, 120 aa, synthetic construct
EVQLVESGGGLVQAGDSLRLSCTASGLIGSVIEMGWFRQAPGKEREFVASISVRSIDTYYADSVKGRFTISRDDARNTVYLQMNSLKPEDTAVYYCNVTTFMITGFLEYWGQGTQVTVSS

SEQ ID NO: 10751 - protein, 120 aa, synthetic construct
EVQLVESGGGLVQAGDSLRLSCTASGGSVQVLEMGWFRQAPGKEREFVASISNWNALTYYADSVKGRFTISRDDARNTVYLQMNSLKPEDTAVYYCNVTIFNRTGFLEYWGQGTQVTVSS

SEQ ID NO: 10752 - protein, 119 aa, synthetic construct
EVQLVESGGGLVQAGDSLRLSCTASGRNDAMIEMGWFRQAPGKEREFVASISGFHSATYYADSVKGRFTISRDDARNTVYLQMNSLKPEDTAVYYCNVSMSRDELFEYWGQGTQVTVSS

SEQ ID NO: 10753 - protein, 120 aa, synthetic construct
EVQLVESGGGLVQAGDSLRLSCTASGVTSIVLEMGWFRQAPGKEREFVASISGRSHATYYADSVKGRFTISRDDARNTVYLQMNSLKPEDTAVYYCNVTLVSDFAFVEYWGQGTQVTVSS

SEQ ID NO: 10754 - protein, 121 aa, synthetic construct
EVQLVESGGGLVQAGDSLRLSCTASGPITSALEMGWFRQAPGKEREFVASISVRFNYTYYADSVKGRFTISRDDARNTVYLQMNSLKPEDTAVYYCNVTGVDAMGYIREYWGQGTQVTVSS

SEQ ID NO: 10755 - protein, 125 aa, synthetic construct
EVQLVESGGGLVQAGDSLRLSCTASGMRIAFRCMGWFRQAPGKEREFVASISGFGLCTYYADSVKGRFTISRDDARNTVYLQMNSLKPEDTAVYYCNVDTVSGGDAAWRSAWEYWGQGTQVTVSS

SEQ ID NO: 10756 - protein, 120 aa, synthetic construct
EVQLVESGGGLVQAGDSLRLSCTASGHVTNVIEMGWFRQAPGKEREFVASISGHYAYTYYADSVKGRFTISRDDARNTVYLQMNSLKPEDTAVYYCNATVVTRNSFKEYWGQGTQVTVSS

SEQ ID NO: 10757 - protein, 120 aa, synthetic construct
EVQLVESGGGLVQAGDSLRLSCTASGMGFFVVEMGWFRQAPGKEREFVASISGGHAYTYYADSVKGRFTISRDDARNTVYLQMNSLKPEDTAVYYCNVTVVRALGFGEYWGQGTQVTVSS

SEQ ID NO: 10758 - protein, 123 aa, synthetic construct
EVQLVESGGGLVQAGDSLRLSCTASGRETGVIEMGWFRQAPGKEREFVASISVSDSYTYYADSVKGRFTISRDDARNTVYLQMNSLKPEDTAVYYCNVVVAPNFRHARFMEYWGQGTQVTVSS

SEQ ID NO: 10759 - protein, 117 aa, synthetic construct
EVQLVESGGGLVQAGDSLRLSCTASGPAAVLMEMGWFRQAPGKEREFVASISGQKQYTYYADSVKGRFTISRDDARNTVYLQMNSLKPEDTAVYYCNVWDRLFMEYWGQGTQVTVSS

SEQ ID NO: 10760 - protein, 119 aa, synthetic construct
EVQLVESGGGLVQAGDSLRLSCTASGITNGIIEMGWFRQAPGKEREFVASISGKDFSTYYADSVKGRFTISRDDARNTVYLQMNSLKPEDTAVYYCNVTSCIVHFFEYWGQGTQVTVSS

SEQ ID NO: 10761 - protein, 121 aa, synthetic construct
EVQLVESGGGLVQAGDSLRLSCTASGVPGRVIEMGWFRQAPGKEREFVASISAVRAYTYYADSVKGRFTISRDDARNTVYLQMNSLKPEDTAVYYCNVVALGGFCVFVEYWGQGTQVTVSS

SEQ ID NO: 10762 - protein, 123 aa, synthetic construct
EVQLVESGGGLVQAGDSLRLSCTASGHRVLTSRMGWFRQAPGKEREFVASISTTATYYADSVKGRFTISRDDARNTVYLQMNSLKPEDTAVYYCNVDYWTVFKVIIDSASEYWGQGTQVTVSS

SEQ ID NO: 10763 - protein, 123 aa, synthetic construct
EVQLVESGGGLVQAGDSLRLSCTASGAWGMIIEMGWFRQAPGKEREFVASISNSMLYTYYADSVKGRFTISRDDARNTVYLQMNSLKPEDTAVYYCNVTMLIKRNTVWIAEYWGQGTQVTVSS

SEQ ID NO: 10764 - protein, 122 aa, synthetic construct
EVQLVESGGGLVQAGDSLRLSCTASGNGGGGIEMGWFRQAPGKEREFVASISYGPTGTYYADSVKGRFTISRDDARNTVYLQMNSLKPEDTAVYYCNVTTFETVRKCFVEYWGQGTQVTVSS

SEQ ID NO: 10765 - protein, 121 aa, synthetic construct
EVQLVESGGGLVQAGDSLRLSCTASGQERFWVDMGWFRQAPGKEREFVASISAVPGYTYYADSVKGRFTISRDDARNTVYLQMNSLKPEDTAVYYCNVTAVVGRVRFVEYWGQGTQVTVSS

SEQ ID NO: 10766 - protein, 121 aa, synthetic construct
EVQLVESGGGLVQAGDSLRLSCTASGLWVCPMEMGWFRQAPGKEREFVASISGRAAYTYYADSVKGRFTISRDDARNTVYLQMNSLKPEDTAVYYCNVTMSDKVVGFREYWGQGTQVTVSS

SEQ ID NO: 10767 - protein, 120 aa, synthetic construct
EVQLVESGGGLVQAGDSLRLSCTASGKIVHQLGMGWFRQAPGKEREFVASISKRLADTYYADSVKGRFTISRDDARNTVYLQMNSLKPEDTAVYYCNVTCVNMAGFVEYWGQGTQVTVSS

SEQ ID NO: 10768 - protein, 124 aa, synthetic construct
EVQLVESGGGLVQAGDSLRLSCTASGNTQDAIEMGWFRQAPGKEREFVASISRRVVYTYYADSVKGRFTISRDDARNTVYLQMNSLKPEDTAVYYCNVCYVLQVTGKMMFTEYWGQGTQVTVSS

SEQ ID NO: 10769 - protein, 120 aa, synthetic construct
EVQLVESGGGLVQAGDSLRLSCTASGCREGWLEMGWFRQAPGKEREFVASISGKTGATYYADSVKGRFTISRDDARNTVYLQMNSLKPEDTAVYYCNVVVFRMTVFNEYWGQGTQVTVSS

SEQ ID NO: 10770 - protein, 121 aa, synthetic construct
EVQLVESGGGLVQAGDSLRLSCTASGGRCNGVEMGWFRQAPGKEREFVASISLKRYDTYYADSVKGRFTISRDDARNTVYLQMNSLKPEDTAVYYCNVTVIVAGVGFEEYWGQGTQVTVSS

SEQ ID NO: 10771 - protein, 125 aa, synthetic construct
EVQLVESGGGLVQAGDSLRLSCTASGSVQGILEMGWFRQAPGKEREFVASISRVVHYTYYADSVKGRFTISRDDARNTVYLQMNSLKPEDTAVYYCNVTKVVPEGPMRIRIAEYWGQGTQVTVSS

SEQ ID NO: 10772 - protein, 122 aa, synthetic construct
EVQLVESGGGLVQAGDSLRLSCTASGHVAELVEMGWFRQAPGKEREFVASISSRQAYTYYADSVKGRFTISRDDARNTVYLQMNSLKPEDTAVYYCNVVVIERNLPVFREYWGQGTQVTVSS

SEQ ID NO: 10773 - protein, 119 aa, synthetic construct
EVQLVESGGGLVQAGDSLRLSCTASGRRTVFHDMGWFRQAPGKEREFVASISGFRVVTYYADSVKGRFTISRDDARNTVYLQMNSLKPEDTAVYYCNVMCEERSATEYWGQGTQVTVSS

SEQ ID NO: 10774 - protein, 120 aa, synthetic construct
EVQLVESGGGLVQAGDSLRLSCTASGMMFVFHDMGWFRQAPGKEREFVASISGFGSLTYYADSVKGRFTISRDDARNTVYLQMNSLKPEDTAVYYCNVDTLGIGHSREYWGQGTQVTVSS

SEQ ID NO: 10775 - protein, 120 aa, synthetic construct
EVQLVESGGGLVQAGDSLRLSCTASGTSGDTLEMGWFRQAPGKEREFVASISACHRYTYYANSVKGRFTISRDDARNTVYLQMNSLKPEDTAVYYCNVVVVTRNGFVEYWGQGTQVTVSS

SEQ ID NO: 10776 - protein, 124 aa, synthetic construct
EVQLVESGGGLVQAGDSLRLSCTASGDCNKHVLMDWFRQAPGKEREFVASISGRHVYTYYADSVKGRFTISRDDARNTVYLQMNSLKPEDTAVYYCNVVDYIVVNGAGIFIEYWGQGTQVTVSS

SEQ ID NO: 10777 - protein, 120 aa, synthetic construct
EVQLVESGGGLVQAGDSLRLSCTASGKGTQIIEMGWFRQAPGKEREFVASISMRMAYTYYADSVKGRFTISRDDARNTVYLQMNSLKPEDTAVYYCNVTGIARRQIDEYWGQGTQVTVSS

SEQ ID NO: 10778 - protein, 119 aa, synthetic construct
EVQLVESGGGLVQAGDSLRLSCTASGMMNRIVEMGWFRQAPGKEREFVASISGHCTYTYYADSVKGRFTISRDDARNTVYLQMNSLKPEDTAVYYCNVTCMGVTKSEYWGQGTQVTVSS

SEQ ID NO: 10779 - protein, 119 aa, synthetic construct
EVQLVESGGGLVQAGDSLRLSCTASGMLGNVIEMGWFRQAPGKEREFVASISGIRRVTYYADSVKGRFTISRDDARNTVYLQMNSLKPEDTAVYYCNVTALDVKFREYWGQGTQVTVSS

SEQ ID NO: 10780 - protein, 116 aa, synthetic construct
EVQLVESGGGLVQAGDSLRLSCTASGIEMGWFRQAPGKEREFVASISRSGHYTYYADSVKGRFTISRDDARNTVYLQMNSLKPEDTAVYYCNVSLLVNMGKLQEYWGQGTQVTVSS

SEQ ID NO: 10781 - protein, 119 aa, synthetic construct
EVQLVESGGGLVQAGDSLRLSCTASGNVIRPIEMGWFRQAPGKEREFVASISCTTGVTYYADSVKGRFTISRDDARNTVYLQMNSLKPEDTAVYYCNVTCLRDIFVEYWGQGTQVTVSS

SEQ ID NO: 10782 - protein, 119 aa, synthetic construct
EVQLVESGGGLVQAGDSLRLSCTASGIRDHCIEMGWFRQAPGKEREFVASISIRRAYTYYADSVKGRFTISRDDARNTVYLQMNSLKPEDTAVYYCNVTLLTGVFVEYWGQGTQVTVSS

SEQ ID NO: 10783 - protein, 120 aa, synthetic construct
EVQLVESGGGLVQAGDSLRLSCTASGMVALPMEMGWFRQAPGKEREFVASISCLGTYTYYADSVKGRFTISRDDARNTVYLQMNSLKPEDTAVYYCNVTALGSISLVEYWGQGTQVTVSS

SEQ ID NO: 10784 - protein, 120 aa, synthetic construct
EVQLVESGGGLVQAGDSLRLSCTASGHEAVVIEMGWFRQAPGKEREFVASISGQRLYTYYADSVKGRFTISRDDARNTVYLQMNSLKPEDTAVYYCNVLIITRNALQEYWGQGTQVTVSS

SEQ ID NO: 10785 - protein, 121 aa, synthetic construct
EVQLVESGGGLVQAGDSLRLSCTASGRSHNILEMGWFRQAPGKEREFVASISDKEAITYYADSVKGRFTISRDDARNTVYLQMNSLKPEDTAVYYCNVTIFSRSGGFQEYWGQGTQVTVSS

SEQ ID NO: 10786 - protein, 122 aa, synthetic construct
EVQLVESGGGLVQAGDSLRLSCTASGRMRDILEMGWFRQAPGKEREFVASISARSMYTYYADSVKGRFTISRDDARNTVYLQMNSLKPEDTAVYYCNVLGKSQVTGVWREYWGQGTQVTVSS

SEQ ID NO: 10787 - protein, 124 aa, synthetic construct
EVQLVESGGGLVQAGDSLRLSCTASGANEKGLTVDMGWFRQAPGKEREFVASISINWQYTYYADSVKGRFTISRDDARNTVYLQMNSLKPEDTAVYYCNVTTLELASPWFREYWGQGTQVTVSS

SEQ ID NO: 10788 - protein, 121 aa, synthetic construct
EVQLVESGGGLVQAGDSLRLSCTASGQRGVIMEMGWFRQAPGKEREFVASISGVTVYTYYADSVKGRFTISRDDARNTVYLQMNSLKPEDTAVYYCNVSTLGGASRLSEYWGQGTQVTVSS

SEQ ID NO: 10789 - protein, 122 aa, synthetic construct
EVQLVESGGGLVQAGDSLRLSCTASGDCFVPMEMGWFRQAPGKEREFVASISYTRMYTYYADSVKGRFTISRDDARNTVYLQMNSLKPEDTAVYYCNVFGKVLMTHGFEEYWGQGTQVTVSS

SEQ ID NO: 10790 - protein, 121 aa, synthetic construct
EVQLVESGGGLVQAGDSLRLSCTASGVTKGAMEMGWFRQAPGKEREFVASISMRAVYTYYADSVKGRFTISRDDARNTVYLQMNSLKPEDTAVYYCNVTVVGYEIRVREYWGQGTQVTVSS

SEQ ID NO: 10791 - protein, 116 aa, synthetic construct
EVQLVESGGGLVQAGDSLRLSCTASGRTTDILFMGWFRQAPGKEREFVASIFKVVSTYYADSVKGRFTISRDDARNTVYLQMNSLKPEDTAVYYCNVVGFLDREYWGQGTQVTVSS

SEQ ID NO: 10792 - protein, 119 aa, synthetic construct
EVQLVESGGGLVQAGDSLRLSCTASGDSRQVIEMGWFRQAPGKEREFVASISTRVHYTYYADSVKGRFTISRDDARNTVYLQMNSLKPEDTAVYYCNVTGIAVRFREYWGQGTQVTVSS

SEQ ID NO: 10793 - protein, 119 aa, synthetic construct
EVQLVESGGGLVQAGDSLRLSCTASGRLMLWLEMGWFRQAPGKEREFVASISRTHTYTYYADSVKGRFTISRDDARNTVYLQMNSLKPEDTAVYYCNVTVVGVRIIEYWGQGTQVTVSS

SEQ ID NO: 10794 - protein, 120 aa, synthetic construct
EVQLVESGGGLVQAGDSLRLSCTASGSNSVAVEMGWFRQAPGKEREFVASISGTINYTYYADSVKGRFTISRDDARNTVYLQMNSLKPEDTAVYYCNVCIFGDHSFSEYWGQGTQVTVSS

SEQ ID NO: 10795 - protein, 120 aa, synthetic construct
EVQLVESGGGLVQAGDSLRLSCTASGKLCRMLEMGWFRQAPGKEREFVASISDGLNFTYYADSVKGRFTISRDDARNTVYLQMNSLKPEDTAVYYCNVCVIDACYPKEYWGQGTQVTVSS

SEQ ID NO: 10796 - protein, 119 aa, synthetic construct
EVQLVESGGGLVQAGDSLRLSCTASGPLLGTMEMGWFRQAPGKEREFVASISTAWATTYYADSVKGRFTISRDDARNTVYLQMNSLKPEDTAVYYCNVTVLVRMFREYWGQGTQVTVSS

SEQ ID NO: 10797 - protein, 117 aa, synthetic construct
EVQLVESGGGLVQAGDSLRLSCTASGNMSIPVRMGWFRQAPGKEREFVASISGVIGCTYYADSVKGRFTISRDDARNTVYLQMNSLKPEDTAVYYCNVLTDRIREYWGQGTQVTVSS

SEQ ID NO: 10798 - protein, 121 aa, synthetic construct
EVQLVESGGGLVQAGDSLRLSCTASGMTRLVVEMGWFRQAPGKEREFVASISGQSEYTYYADSVKGRFTISRDDARNTVYLQMNSLKPEDTAVYYCNVVVVSKGGGFGEYWGQGTQVTVSS

SEQ ID NO: 10799 - protein, 117 aa, synthetic construct
EVQLVESGGGLVQAGDSLRLSCTASGLVADIMEMGWFRQAPGKEREFVASISARVAYTYYADSVKGRFTISRDDARNTVYLQMNSLKPEDTAVYYCNVWTLGLCEYWGQGTQVTVSS

SEQ ID NO: 10800 - protein, 119 aa, synthetic construct
EVQLVESGGGLVQAGDSLRLSCTASGPEEPVMEMGWFRQAPGKEREFVASISGFGQYTYYADSVKGRFTISRDDARNTVYLQMNSLKPEDTAVYYCNVVYFQIGKAEYWGQGTQVTVSS

SEQ ID NO: 10801 - protein, 119 aa, synthetic construct
EVQLVESGGGLVQAGDSLRLSCTASGSRSGQQEMGWFRQAPGKEREFVASISVRQAYTYYADSVKGRFTISRDDARNTVYLQMNSLKPEDTAVYYCNVSVVMVDLKEYWGQGTQVTVSS

SEQ ID NO: 10802 - protein, 124 aa, synthetic construct
EVQLVESGGGLVQAGDSLRLSCTASGLVGWVLEMGWFRQAPGKEREFVASISGHGLTTYYADSVKGRFTISRDDARNTVYLQMNSLKPEDTAVYYCNVTALIDSRDGIVVLEYWGQGTQVTVSS

SEQ ID NO: 10803 - protein, 119 aa, synthetic construct
EVQLVESGGGLVQAGDSLRLSCTASGGRLRMLEMGWFRQAPGKEREFVASISTANGDTYYADSVKGRFTISRDDARNTVYLQMNSLKPEDTAVYYCNVTAFVLMFHEYWGQGTQVTVSS

SEQ ID NO: 10804 - protein, 121 aa, synthetic construct
EVQLVESGGGLVQAGDSLRLSCTASGTDDFIVEMGWFRQAPGKEREFVASISGEVSYTYYADSVKGRFTISRDDARNTVYLQMNSLKPEDTAVYYCNVTVHHKEGRFREYWGQGTQVTVSS

SEQ ID NO: 10805 - protein, 124 aa, synthetic construct
EVQLVESGGGLVQAGDSLRLSCTASGNGTGVLEMGWFRQAPGKEREFVASISGFGLATYYADSVKGRFTISRDDARNTVYLQMNSLKPEDTAIYYCNVHDVDMVLDIGRVVEYWGQGTQVTVSS

SEQ ID NO: 10806 - protein, 119 aa, synthetic construct
EVQLVESGGGLVQAGDSLRLSCTASGNAKRVIEMGWFRQAPGKEREFVASISGNGVYTYYADSVKGRFTISRDDARNTVYLQMNSLKPEDTAVYYCNVCYIVTRLVEYWGQGTQVTVSS

SEQ ID NO: 10807 - protein, 120 aa, synthetic construct
EVQLVESGGGLVQAGDSLRLSCTASGSSYDMLEMGWFRQAPGKEREFVASISMMRNWTYYADSVKGRFTISRDDARNTVYLQMNSLKPEDTAVYYCNVTIVSTQGFAEYWGQGTQVTVSS

SEQ ID NO: 10808 - protein, 121 aa, synthetic construct
EVQLVESGGGLVQAGDSLRLSCTASGSGTMVVEMGWFRQAPGKEREFVASISGSSGGTYYADSVKGRFTISRDDARNTVYLQMNSLKPEDTAVYYCNVTGYGAVDGFTEYWGQGTQVTVSS

SEQ ID NO: 10809 - protein, 119 aa, synthetic construct
EVQLVESGGGLVQAGDSLRLSCTASGNLGTIVGMGWFRQAPGKEREFVASISHRIGETYYADSVKGRFTISRDDARNTVYLQMNSLKPEDTAVYYCNVTGFRKLFVEYWGQGTQVTVSS

SEQ ID NO: 10810 - protein, 121 aa, synthetic construct
EVQLVESGGGLVQAGDSLRLSCTASGKRGDQLGMGWFRQAPGKEREFVASISNRIGATYYADSVKGRFTISRDDARNTVYLQMNSLKPEDTAVYYCNVTTFVPVVFFVEYWGQGTQVTVSS

SEQ ID NO: 10811 - protein, 119 aa, synthetic construct
EVQLVESGGGLVQAGDSLRLSCTASGDVYGVLEMGWFRQAPGKEREFVASISCMQGRTYYADSVKGRFTISRDDARNTVYLQMNSLKPEDTAVYYCNVTRFNLLFIEYWGQGTQVTVSS

SEQ ID NO: 10812 - protein, 120 aa, synthetic construct
EVQLVESGGGLVQAGDSLRLSCTASGRRIGVVEMGWFRQAPGKEREFVASISALREYTYYADSVKGRFTISRDDARNTVYLQMNSLKPEDTAVYYCNLVSFDVVTFREYWGQGTQVTVSS

SEQ ID NO: 10813 - protein, 121 aa, synthetic construct
EVQLVESGGGLVQAGDSLRLSCTASGMAWPIISMDWFRQAPGKEREFVASISGMDASTYYADSVKGRFTISRDDARNTVYLQMNSLKPEDTAVYYCNVSAFFALHYFVEYWGQGTQVTVSS

SEQ ID NO: 10814 - protein, 119 aa, synthetic construct
EVQLVESGGGLVQAGDSLRLSCTASGVLDRIIEMGWFRQAPGKEREFVASISRELLTYYADSVKGRFTISRDDARNTVYLQMNSLKPEDTAVYYCNVTRHVSTGFKEYWGQGTQVTVSS

SEQ ID NO: 10815 - protein, 124 aa, synthetic construct
EVQLVESGGGLVQAGDSLRLSCTASGTRNVFKSMGWFRQAPGKEREFVASISGFRGETYYADSVKGRFTISRDDARNTVYLQMNSLKPEDTAVYYCNVLGTSVDVMAHDRMEYWGQGTQVTVSS

SEQ ID NO: 10816 - protein, 119 aa, synthetic construct
EVQLVESGGGLVQAGDSLRLSCTASGVHGTIIEMGWFRQAPGKEREFVASISNNVIYTYYADSVKGRFTISRDDARNTVYLQMNSLKPEDTAVYYCNVAAFHIYFTEYWGQGTQVTVSS

SEQ ID NO: 10817 - protein, 121 aa, synthetic construct
EVQLVESGGGLVQAGDSLRLSCTASGRLANVVEMGWFRQAPGKEREFVASISGFGRSTYYADSVKGRFTISRDDARNTVYLQMNSLKPEDTAVYYCNVTVRDSIRGFLEYWGQGTQVTVSS

SEQ ID NO: 10818 - protein, 119 aa, synthetic construct
EVQLVESGGGLVQAGDSLRLSCTASGKVNFILEMGWFRQAPGKEREFVASISMAGYYTYYADSVKGRFTISRDDARNTVYLQMNSLKPEDTAVYYCNVFMRDPFGDEYWGQGTQVTVSS

SEQ ID NO: 10819 - protein, 118 aa, synthetic construct
EVQLVESGGGLVQAGDSLRLSCTASGQASSIRTMGWFRQAPGKEREFVASISGFGHDTYYADSVKGRFTISRDDARNTVYLQMNSLKPEDTAVYYCNVMEEDRMKEYWGQGTQVTVSS

SEQ ID NO: 10820 - protein, 120 aa, synthetic construct
EVQLVESGGGLVQAGDSLRLSCTASGEMVKSIEMGWFRQAPGKEREFVASISATHVGTYYADSVKGRFTISRDDARNTVYLQMNSLKPEDTAVYYCNVTALVSSVFVEYWGQGTQVTVSS

SEQ ID NO: 10821 - protein, 120 aa, synthetic construct
EVQLVESGGGLVQAGDSLRLSCTASGMGARVVEMGWFRQAPGKEREFVASISAVQRVTYYADSVKGRFTISRDDARNTVYLQMNSLKPEDTAVYYCNVTCLGAWKFDEYWGQGTQVTVSS

SEQ ID NO: 10822 - protein, 121 aa, synthetic construct
EVQLVESGGGLVQAGDSLRLSCTASGARGFVLEMGWFRQAPGKEREFVASISSTSSYTYYADSVKGRFTISRDDARNTVYLQMNSLKPEDTAVYYCNVVSVINSLAFLEYWGQGTQVTVSS

SEQ ID NO: 10823 - protein, 120 aa, synthetic construct
EVQLVESGGGLVQAGDSLRLSCTASGVIAPFLEMGWFRQAPGKEREFVASISGTHSYTYYADSVKGRFTISRDDARNTVYLQMNSLKPEDTAVYYCNVVIVGPIFIREYWGQGTQVTVSS

SEQ ID NO: 10824 - protein, 125 aa, synthetic construct
EVQLVESGGGLVQAGDSLRLSCTASGHSSGTMEMGWFRQAPGKEREFVASISGTRFYTYYADSVKGRFTISRDDARNTVYLQMNSLKPEDTAVYYCNVTSLEVRNDIVVGVVEYWGQGTQVTVSS

SEQ ID NO: 10825 - protein, 121 aa, synthetic construct
EVQLVESGGGLVQAGDSLRLSCTASGEIVMIIEMGWFRQAPGKEREFVASISGIGCYTYYADSVKGRFTISRDDARNTVYLQMNSLKPEDTAVYYCNVLGMPKHRVIKEYWGQGTQVTVSS

SEQ ID NO: 10826 - protein, 120 aa, synthetic construct
EVQLVESGGGLVQAGDSLRLSCTASGPDAAMVEMGWFRQAPGKEREFVASISCQSNYTYYADSVKGRFTISRDDARNTVYLQMNSLKPEDTAVYYCNVTGIVGNSFAEYWGQGTQVTVSS

SEQ ID NO: 10827 - protein, 124 aa, synthetic construct
EVQLVESGGGLVQAGDSLRLSCTASGRAETSLEMGWFRQAPGKERKFVASISGRNDATYYADSVKGRFTISRDDARNTVYLQMNSLKPEDTAVYYCNVTGLITARGVMIIREYWGQGTQVTVSS

SEQ ID NO: 10828 - protein, 120 aa, synthetic construct
EVQLVESGGGLVQAGDSLRLSCTASGCYDVVLEMGWFRQAPGKEREFVASISVSRGLTYYADSVKGRFTISRDDARNTVYLQMNSLKPEDTAVYYCNVTCFNSVLFIEYWGQGTQVTVSS

SEQ ID NO: 10829 - protein, 120 aa, synthetic construct
EVQLVESGGGLVQAGDSLRLSCTASGSMKAMLEMGWFRQAPGKEREFVASISRVVDYTYYADSVKGRFTISRDDARNTVYLQMNSLKPEDTAVYYCNVTVVKMPSITEYWGQGTQVTVSS

SEQ ID NO: 10830 - protein, 120 aa, synthetic construct
EVQLVESGGGLVQAGDSLRLSCTASGTAKTWMCMDWFRQAPGKEREFVASISVKAGVTYYADSVKGRFTISRDDARNTVYLQMNSLKPEDTAVYYCNVVTVRLGLFKEYWGQGTQVTVSS

SEQ ID NO: 10831 - protein, 125 aa, synthetic construct
EVQLVESGGGLVQAGDSLRLSCTASGDTLNNGSMGWFRQAPGKEREFVASISVMLIQTYYADSVKGRFTISRDDARNTVYLQMNSLKPEDTAVYYCNVRTILSRGSGRLRFEEYWGQGTQVTVSS

SEQ ID NO: 10832 - protein, 119 aa, synthetic construct
EVQLVESGGGLVQAGDSLRLSCTASGRCELVLEMGWFRQAPGKEREFVASISGSTTYTYYADSVKGRFTISRDDARNTVYLQMNSLKPEDTAVYYCNVAVSGIRFHEYWGQGTQVTVSS

SEQ ID NO: 10833 - protein, 118 aa, synthetic construct
EVQLVESGGGLVQAGDSLRLSCTASGNHVIVIEMGWFRQAPGKEREFVASISGFQGRTYYAESVKGRFTISRDDARNTVYLQMNSLKPEDTAVYYCNVADADRLTEYWGQGTQVTVSS

SEQ ID NO: 10834 - protein, 121 aa, synthetic construct
EVQLVESGGGLVQAGDSLRLSCTASDIRSKWIRMGWFRQAPGKEREFVASISDNYAITYYADSVKGRFTISRDDARNTVYLQMNSLKPEDTAVYYCNVLCVIQRVGWMEYWGQGTQVTVSS

SEQ ID NO: 10835 - protein, 124 aa, synthetic construct
EVQLVESGGGLVQAGDSLRLSCTASGKMNDKLEMGWFRQAPGKEREFVASISVRKVYTYYADSVKGRFTISRDDARNTVYLQMNSLKPEDTAVYYCNVTAVGSVHGIWGVNEYWGQGTQVTVSS

SEQ ID NO: 10836 - protein, 120 aa, synthetic construct
EVQLVESGGGLVQAGDSLRLSCTASGRMVDGVEMGWFRQAPGKEREFVASISTNQNYTYYADSVKGRFTISRDDARNTVYLQMNSLKPEDTAVYYCNVVRLVGHKFMEYWGQGTQVTVSS

SEQ ID NO: 10837 - protein, 119 aa, synthetic construct
EVQLVESGGGLVQAGDSLRLSCTASGDHFAPLEMGWFRQAPGKEREFVASISYRHGYTYYADSVKGRFTISRDDARNTVYLQMNSLKPEDTAVYYCNVTIVATRVMEYWGQGTQVTVSS

SEQ ID NO: 10838 - protein, 122 aa, synthetic construct
EVQLVESGGGLVQAGDSLRLSCTASGKGIHIVEMGWFRQAPGKEREFVASISRSVHYTYYADSVKGRFTISRDDARNTVYLQMNSLKPEDTAVYYCNVTVYVNKGPYFLEYWGQGTQVTVSS

SEQ ID NO: 10839 - protein, 117 aa, synthetic construct
EVQLVESGGGLVQAGDSLRLSCTASGNNCSVVLMGWFRQAPGKEREFVASISFTSAWTYYADSVKGRFTISRDDARNTVYLQMNSLKPEDTAVYYCNVLSTRIVEYWGQGTQVTVSS

SEQ ID NO: 10840 - protein, 120 aa, synthetic construct
EVQLVESGGGLVQAGDSLRLSCTASGAGEMLMEMGWFRQAPGKEREFVASISGMSRYTYYADSVKGRFTISRDDARNTVYLQMNSLKPEDTAVYYCNVTEAGNAGFMEYWGQGTQVTVSS

SEQ ID NO: 10841 - protein, 122 aa, synthetic construct
EVQLVESGGGLVQAGDSLRLSCTASGHVEYVLEMGWFRQAPGKEREFVASISGHSDFTYYADSVKGRFTISRDDARNTVYLQMNSLKPEDTAVYYCNVTVFSSMQSGLTEYWGQGTQVTVSS

SEQ ID NO: 10842 - protein, 122 aa, synthetic construct
EVQLVESGGGLVQAGDSLRLSCTASGKALHMAEMGWFRQAPGKEREFVASISVWNHYTYYADSVKGRFTISRDDARNTVYLQMNSLKPEDTAVYYCNVTTLDLIRGLKFEYWGQGTQVTVSS

SEQ ID NO: 10843 - protein, 121 aa, synthetic construct
EVQLVESGGGLVQAGDSLRLSCTASGRGTRFMEMGWFRQAPGKEREFVASISVRQSYTYYADSVKGRFTISRDDARNTVYLQMNSLKPEDTAVYYCNVSVYSDRWFFSEYWGQGTQVTVSS

SEQ ID NO: 10844 - protein, 121 aa, synthetic construct
EVQLVESGGGLVQAGDSLRLSCTASGTVQGILEMGWFRQAPGKEREFVASISARHEDTYYADSVKGRFTISRDDARNTVYLQMNSLKPEDTAVYYCNVTLFTSAVFFVEYWGQGTQVTVSS

SEQ ID NO: 10845 - protein, 112 aa, synthetic construct
EVQLVESGGGLVQAGDSLRLSCTASGMMAARRFMGWFRQAPGKEREFVASIYLGISTYYADSVKGRFTISRDDARNTVYLQMNSLKPEDTAVYYCNVEMEYWGQGTQVTVSS

SEQ ID NO: 10846 - protein, 119 aa, synthetic construct
EVQLVESGGGLVQAGDSLRLSCTASGIGQNVIEMGWFRQAPGKEREFVASISGARLYTYYADSVKGRFTISRDDARNTVYLQMNSLKPEDTAVYYCNVTLFDMIVEEYWGQGTQVTVSS

SEQ ID NO: 10847 - protein, 125 aa, synthetic construct
EVQLVESGGGLVQAGDSLRLSCTASGNCSNILDMGWFRQAPGKEREFVASISCTQYYTYYADSVKGRFTISRDDARNTVYLQMNSLKPEDTAVYYCNVTIVELVDSGRMQFREYWGQGTQVTVSS

SEQ ID NO: 10848 - protein, 121 aa, synthetic construct
EVQLVESGGGLVQAGDSLRLSCTASGHMSRLIEMGWFRQAPGKEREFVASISAAWALTYYADSVKGRFTISRDDARNTVYLQMNSLKPEDTAVYYCNVTILREGCGFDEYWGQGTQVTVSS

SEQ ID NO: 10849 - protein, 120 aa, synthetic construct
EVQLVESGGGLVQAGDSLRLSCTASGVDSGIIEMGWFRQAPGKEREFVASISVITIYTYYADSVKGRFTISRDDARNTVYLQMNSLKPEDTAVYYCNVSVLDQRGLVEYWGQGTQVTVSS

SEQ ID NO: 10850 - protein, 120 aa, synthetic construct
EVQLVESGGGLVQAGDSLRLSCTASGRFGHVVEMGWFRQAPGKEREFVASISAVGIYTYYADSVKGRFTISRDDARNTVYLQMNSLKPEDTAVYYCNVSEMVYTGVVEYWGQGTQVTVSS

SEQ ID NO: 10851 - protein, 120 aa, synthetic construct
EVQLVESGGGLVQAGDSLRLSCTASGAVRLMMEMGWFRQAPGKEREFVASISWKNSSTYYADSVKGRFTISRDDARNTVYLQMNSLKPEDTAVYYCNVTELGIGGFIEYWGQGTQVTVSS

SEQ ID NO: 10852 - protein, 125 aa, synthetic construct
EVQLVESGGGLVQAGDSLRLSCTASGTAQNVLQMGWFRQAPGKEREFVASISVGWCRTYYADSVKGRFTISRDDARNTVYLQMNSLKPEDTAVYYCNVLDLVKGNGGIFKFGEYWGQGTQVTVSS

SEQ ID NO: 10853 - protein, 124 aa, synthetic construct
EVQLVESGGGLVQAGDSLRLSCTASGSGVGVLEMGWFRQAPGKEREFVASISAASGDTYYADSVKGRFTISRDDARNTVYLQMNSLKPEDTAVYYCNVTALSKDVHGLRFVEYWGQGTQVTVSS

SEQ ID NO: 10854 - protein, 123 aa, synthetic construct
EVQLVESGGGLVQAGDSLRLSCTASGYMEHVLEMGWFRQAPGKEREFVASISTNVDYTYYADSVKGRFTISRDDARNTVYLQMNSLKPEDTAVYYCNVTVIGGATVFGFGEYWGQGTQVTVSS

SEQ ID NO: 10855 - protein, 120 aa, synthetic construct
EVQLVESGGGLVQAGDSLRLSCTASGECTGILEMGWFRQAPGKEREFVASISKGRVYTYYADSVKGRFTISRDDARNTVYLQMNSLKPEDTAVYYCNVTAIRATSIAEYWGQGTQVTVSS

SEQ ID NO: 10856 - protein, 119 aa, synthetic construct
EVQLVESGGGLVQAGDSLRLSCTASGAKVRVVEMGWFRQAPGKEREFVASISGTLYHTYYADSVKGRFTISRDDARNTVYLQMNSLKPEDTAVYYCNVTSFERIFREYWGQGTQVTVSS

SEQ ID NO: 10857 - protein, 119 aa, synthetic construct
EVQLVESGGGLVQAGDSLRLSCTASGELRGVMEMGWFRQAPGKEREFVASISMKGAYTYYADSVKGRFTISRDDARNTVYLQMNSLKPEDTAVYYCNVWIVANGVAEYWGQGTQVTVSS

SEQ ID NO: 10858 - protein, 120 aa, synthetic construct
EVQLVESGGGLVQAGDSLRLSCTASGVMNNVLEMGWFRQAPGKEREFVASISGLGSYTYYADSVKGRFTISRDDARNTVYLQMNSLKPEDTAVYYCNVLTFGVDVVIEYWGQGTQVTVSS

SEQ ID NO: 10859 - protein, 119 aa, synthetic construct
EVQLVESGGGLVQAGDSLRLSCTASGGADRCIEMGWFRQAPGKEREFVASISGQKLSTYYADSVKGRFTISRDDARNTVYLQMNSLKPEDTAVYYCNVTEFSGGFHEYWGQGTQVTVSS

SEQ ID NO: 10860 - protein, 124 aa, synthetic construct
EVQLVESGGGLVQAGDSLRLSCTASGNRAATIEMGWFRQAPGKEREFVASISKNQVYTYYADSVKGRFTISRDDARNTVYLQMNSLKPEDTAVYYCNVTEVRGNPVAIRFVEYWGQGTQVTVSS

SEQ ID NO: 10861 - protein, 120 aa, synthetic construct
EVQLVESGGGLVQAGDSLRLSCTASGTTDNLIEMGWFRQAPGKEREFVASISVANGDTYYADSVKGRFTISRADARNTVYLQMNSLKPEDTAVYYCNVTVWACGDFVEYWGQGTQVTVSS

SEQ ID NO: 10862 - protein, 120 aa, synthetic construct
EVQLVESGGGLVQAGDSLRLSCTASGGVPLLLEMGWFRQAPGKEREFVASISGITGDTYYADSVKGRFTISRDDARNTVYLQMNSLKPEDTAVYYCNVTGLLSQRFVEYWGQGTQVTVSS

SEQ ID NO: 10863 - protein, 121 aa, synthetic construct
EVQLVESGGGLVQAGDSLRLSCTASGRVVRFLWMGWFRQAPGKEREFVASISEIGEVTYYADSVKGRFTISRDDARNTVYLQMNSLKPEDTAVYYCNVLAVNMSRAWCEYWGQGTQVTVSS

SEQ ID NO: 10864 - protein, 111 aa, synthetic construct
EVQLVESGGGLVQAGDSLRLSCTASGGVMGWFRQAPGKEREFVASISGTYYADSVKGRFPISRDDARNTVYLQMNSLKPEDTAVYYCDVGCVMDTDPDEYWGQGTQVTVSS

SEQ ID NO: 10865 - protein, 121 aa, synthetic construct
EVQLVESGGGLVQAGDSLRLSCTASGEPGRVMEMGWFRQAPGKEREFVASISMSVVYTYYADSVKGRFTISRDDARNTVYLQMNSLKPEDTAVYYCNVTRVLHNGRVTEYWGQGTQVTVSS

SEQ ID NO: 10866 - protein, 120 aa, synthetic construct
EVQLVESGGGLVQAGDSLRLSCTASGLMDGFLEMGWFRQAPGKEREFVASISGARAFTYYADSVKGRFTISRDDARNTVYLQMNSLKPEDTAVYYCNVVLVVRGMFTEYWGQGTQVTVSS

SEQ ID NO: 10867 - protein, 122 aa, synthetic construct
EVQLVESGGGLVQAGDSLRLSCTASGSGGDLLEMGWFRQAPGKEREFVASISWNHGRTYYADSVKGRFTISRDDARNTVYLQMNSLKPEDTAVYYCNVTAHVRVWVRFVEYWGQGTQVTVSS

SEQ ID NO: 10868 - protein, 120 aa, synthetic construct
EVQLVESGGGLVQAGDSLRLSCTASGRPQRMIEMGWFRQAPGKEREFVASISWTGYYTYYADSVKGRFTISRDDARNTVYLQMNSLKPEDTAVYYCNVTRLLDDGIDEYWGQGTQVTVSS

SEQ ID NO: 10869 - protein, 119 aa, synthetic construct
EVQLVESGGGLVQAGDSLRLSCTASGRRGSCMEMGWFRQAPGKEREFVASISGRDAYTYYADSVKGRFTISRDDARNTVYLQMNSLKPEDTAVYYCNVSVFASRLFEYWGQGTQVTVSS

SEQ ID NO: 10870 - protein, 120 aa, synthetic construct
EVQLVESGGGLVQAGDSLRLSCTASGVIRVFVEMGWFRQAPGKEREFVASISGNNADTYYADSVKGRFTISRDDARNTVYLQMNSLKPEDTAVYYCNVTVVRAKRFQEYWGQGTQVTVSS

SEQ ID NO: 10871 - protein, 120 aa, synthetic construct
EVQLVESGGGLVQAGDSLRLSCTASGKGDSVLEMGWFRQAPGKEREFVASISGLRSYTYYADSVKGRFTISRDDARNTVYLQMNSLKPEDTAVYYCNVVMAAANRLDEYWGQGTQVTVSS

SEQ ID NO: 10872 - protein, 121 aa, synthetic construct
EVQLVESGGGLVQAGDSLRLSCTASGHKSRVLEMGWFRQAPGKEREFVASISYVENHTYYADSVKGRFTISRDDARNTVYLQMNSLKPEDTAVYYCNVTGVAADWGFVEYWGQGTQVTVSS

SEQ ID NO: 10873 - protein, 125 aa, synthetic construct
EVQLVESGGGLVQAGDSLRLSCTASGDLIGIIEMGWFRQAPGKEREFVASISGNGNYTYYADSVKGRFTISRDDARNTVYLQMNSLKPEDTAVYYCNVSVVGLGVRDRGMIREYWGQGTQVTVSS

SEQ ID NO: 10874 - protein, 121 aa, synthetic construct
EVQLVESGGGLVQAGDSLRLSCTASGSSKGVMEMGWFRQAPGKEREFVASISVSGGYTYYADSVKGRFTISRDDARNTVYLQMNSLKPEDTAVYYCNVTTRCGLVGFVEYWGQGTQVTVSS

SEQ ID NO: 10875 - protein, 124 aa, synthetic construct
EVQLVESGGGLVQAGDSLRLSCTASGNVIAVIEMGWFRQAPGKEREFVASISGICDYTYYADSVKGRFTISRDDARNTVYLQMNSLKPEDTAVYYCNVTGMQLNPELTLFVEYWGQGTQVTVSS

SEQ ID NO: 10876 - protein, 121 aa, synthetic construct
EVQLVESGGGLVQAGDSLRLSCTASGGSDWYLEMGWFRQAPGKEREFVASISGHTMYTYYADSVKGRFPISRDDARNTVYLQMNSLKPEDTAVYYCNVTSINDVGKLVEYWGQGTQVTVSS

SEQ ID NO: 10877 - protein, 120 aa, synthetic construct
EVQLVESGGGLVQAGDSLRLSCTASGCPALVVEMGWFRQAPGKEREFVASISAMVQYTYYADSVKGRFTISRDDARNTVYLQMNSLKPEDTAVYYCNVVRHVSRMFEEYWGQGTQVTVSS

SEQ ID NO: 10878 - protein, 120 aa, synthetic construct
EVQLVESGGGLVQAGDSLRLSCTASGSLVSVIEMGWFRQAPGKEREFVASISRRNSYTYYADSVKGRFTISRDDARNTVYLQMNSLKPEDTAVYYCNVACMGVVTFTEYWGQGTQVTVSS

SEQ ID NO: 10879 - protein, 122 aa, synthetic construct
EVQLVESGGGLVQAGDSLRLSCTASGMIIPLVEMGWFRQAPGKEREFVASISVTRSDTYYADSVKGRFTISRDDARNTVYLQMNSLKPEDTAVYYCNVTGYAATLMRFMEYWGQGTQVTVSS

SEQ ID NO: 10880 - protein, 118 aa, synthetic construct
EVQLVESGGGLVQAGDSLRLSCTASGLGDKDDIMGWFRQAPGKEREFVASISNRWTHAYYADSVKGRFTISRDDARNTVYLQMNSLKPEDTAVYYCNVLEVSKWVEYWGQGTQVTVSS

SEQ ID NO: 10881 - protein, 121 aa, synthetic construct
EVQLVESGGGLVQAGDSLRLSCTASGWHGTMLEMGWFRQAPGKEREFVASISGVAMYTYYADSVKGRFTISRDDARNTVYLQMNSLKPEDTAVYYCNVVLWNALGMICEYWGQGTQVTVSS

SEQ ID NO: 10882 - protein, 117 aa, synthetic construct
EVQLVESGGGLVQAGDSLRLSCTASGGMLVFCHMGWFRQAPGKEREFVASISGFGGVTYYADSVKGRFTISRDDARNTVYLQMNSLKPEDTAVYYCNVTGLRVGEYWGQGTQVTVSS

SEQ ID NO: 10883 - protein, 122 aa, synthetic construct
EVQLVESGGGLVQAGDSLRLSCTASGPTCSPLEMGWFRQAPGKEREFVASISCISGGTYYTDSVKGRFTISRDDARNTVYLQMNSLKPEDTAVYYCNVTEFIADEMKFLEYWGQGTQVTVSS

SEQ ID NO: 10884 - protein, 121 aa, synthetic construct
EVQLVESGGGLVQAGDSLRLSCTASGQRIVFVGMGWFRQAPGKEREFVASISGLHSATYYADSVKGRFTISRDDARNTVYLQMNSLKPEDTAVYYCNVLRELHGGDDSEYWGQGTQVTVSS

SEQ ID NO: 10885 - protein, 122 aa, synthetic construct
EVQLVESGGGLVQAGDSLRLSCTASGCTQIVIEMGWFRQAPGKEREFVASISGSRSLTYYADSVKGRFTISRDDARNTVYLQMNSLKPEDTAVYYCNVTGLDLCESVFREYWGQGTQVTVSS

SEQ ID NO: 10886 - protein, 120 aa, synthetic construct
EVQLVESGGGLVQAGDSLRLSCTASGTRGRGVEMGWFRQAPGKEREFVASISVPDIYTYYADSVKGRFTISRDDARNTVYLQMNSLKPEDTAVYYCNVVQFETMVFVEYWGQGTQVTVSS

SEQ ID NO: 10887 - protein, 121 aa, synthetic construct
EVQLVESGGGLVQAGDSLRLSCTASGTTPLFTLMGWFRQAPGKEREFVADISAHGGTYYADSVKGRFTISRDDARNTVYLQMNSLKPEDTAVYYCNVMGFSQANCHRYEYWGQGTQVTVSS

SEQ ID NO: 10888 - protein, 120 aa, synthetic construct
EVQLVESGGGLVQAGDSLRLSCTASGDGTLLIEMGWFRQAPGKEREFVASISGKDHSTYYADSVKGRFTISRDDARNTVYLQMNSLKPEDTAVYYCNVVTLGVWGFIEYWGQGTQVTVSS

SEQ ID NO: 10889 - protein, 120 aa, synthetic construct
EVQLVESGGGLVQAGDSLRLSCTASGSIVIVVEMGWFRQAPGKEREFVASISGGDGTTYYADSVKGRFTISRDDARNTVYLQMNSLKPEDTAVYYCNVTTVGCFGFGEYWGQGTQVTVSS

SEQ ID NO: 10890 - protein, 120 aa, synthetic construct
EVQLVESGGGLVQAGDSLRLSCTASGTWPVIMEMGWFRQAPGKEREFVASISGTGRYTYYADSVKGRFTISRDDARNTVYLQMNSLKPEDTAVYYCNVTLWMDTNLVEYWGQGTQVTVSS

SEQ ID NO: 10891 - protein, 121 aa, synthetic construct
EVQLVESGGGLVQAGDSLRLSCTASGDCSKRIEMGWFRQAPGKEREFVASISGSGAYTYYADSVKGRFTISRDDARNTVYLQMNSLKPEDTAVYYCNVSVIGETGRLHEYWGQGTQVTVSS

SEQ ID NO: 10892 - protein, 124 aa, synthetic construct
EVQLVESGGGLVQAGDSLRLSCTASGSVRAPLEMGWFRQAPGKEREFVASISVSCCYTYYADSVKGRFTISRDDARNTVYLQMNSLKPEDTAVYYCNVTYWNIAEINISFLEYWGQGTQVTVSS

SEQ ID NO: 10893 - protein, 120 aa, synthetic construct
EVQLVESGGGLVQAGDSLRLSCTASGNRDCRVEMGWFRQAPGKEREFVASISMRAVYTYYADSVKGRFTISRDDARNTVYLQMNSLKPEDTAVYYCNVVEIKQLEFTEYWGQGTQVTVSS

SEQ ID NO: 10894 - protein, 125 aa, synthetic construct
EVQLVESGGGLVQAGDSLRLSCTASGLRIAFCGMGWFRQAPGKEREFVASISGFGGLTYYADSVKGRFTISRDDARNTVYLQMNSLKPEDTAVYYCNVDGIDAVTLNPKRFAEYWGQGTQVTVSS

SEQ ID NO: 10895 - protein, 123 aa, synthetic construct
EVQLVESGGGLVQAGDSLRLSCTASGSGARILDMGWFRQAPGKEREFVASISDALSYTYYADSVKGRFTISRDDARNTVYLQMNSLKPEDTAVYYCNVVMLDCNGRKGFFEYWGQGTQVTVSS

SEQ ID NO: 10896 - protein, 120 aa, synthetic construct
EVQLVESGGGLVQAGDSLRLSCTASGRLRCGIEMGWFRQAPGKEREFVASISARTGGTYYADSVKGRFTISRDDARNTVYLQMNSLKPEDTAVYYCNVTALKLDRFIEYWGQGTQVTVSS

SEQ ID NO: 10897 - protein, 114 aa, synthetic construct
EVQLVESGGGLVQAGDSLRLSCTASGHRLVFRNMGWFRQAPGKEREFVASISDFGAVTYYADSVKGRFTISRDDARNTVYLQMNSLKPEDTAVYYCNVGGTEYWGQGTQVTVSS

SEQ ID NO: 10898 - protein, 121 aa, synthetic construct
EVQLVESGGGLVQAGDSLRLSCTASGGIASVLEMGWFRQAPGKEREFVASISVRVGYTYYADSVKGRFTISRDDARNTVYLQMNSLKPEDTAVYYCNVTGVTSGWDFAEYWGQGTQVTVSS

SEQ ID NO: 10899 - protein, 121 aa, synthetic construct
EVQLVESGGGLVQAGDSLRLSCTASGRIWNVIEMGWFRQAPGKEREFVASISRGLEYTYYADSVKGRFTISRDDARNTVYLQMNSLKPEDTAVYYCNVVVLSSDCRFMEYWGQGTQVTVSS

SEQ ID NO: 10900 - protein, 120 aa, synthetic construct
EVQLVESGGGLVQAGDSLRLSCTASGHVRDMIEMGWFRQAPGKEREFVASISMRSKDTYYADSVKGRFTISRDDARNTVYLQMNSLKPEDTAVYYCNVTVLIAVGFFEYWGQGTQVTVSS

SEQ ID NO: 10901 - protein, 120 aa, synthetic construct
EVQLVESGGGLVQAGDSLRLSCTASGKAGTHMEMGWFRQAPGKEREFVASISVVDRYTYYADSVKGRFTISRDDARNTVYLQMNSLKPEDTAVYYCNVTVLARMHFNEYWGQGTQVTVSS

SEQ ID NO: 10902 - protein, 121 aa, synthetic construct
EVQLVESGGGLVQAGDSLRLSCTASGEVLYVVEMGWFRQAPGKEREFVASISGLDGLTYYADSVKGRFTISRDDARNTVYLQMNSLKPEDTAVYYCNVCRLIVGSGFVEYWGQGTQVTVSS

SEQ ID NO: 10903 - protein, 122 aa, synthetic construct
EVQLVESGGGLVQAGDSLRLSCTASGTTGWSLEMGWFRQAPGKEREFVASISVRTGNTYYADSVKGRFTISRDDARNTVYLQMNSLKPEDTAVYYCNVATCDLRNGRFQEYWGQGTQVTVSS

SEQ ID NO: 10904 - protein, 119 aa, synthetic construct
EVQLVESGGGLVQAGDSLRLSCTASGPTARVLEMGWFRQAPGKEREFVASISGARDGTYYADSVKGRFTISRDDARNTVYLQMNSLKPEDTAVYYCNVTAWNAGFVEYWGQGTQVTVSS

SEQ ID NO: 10905 - protein, 120 aa, synthetic construct
EVQLVESGGGLVQAGDSLRLSCTASGMTRNVLEMGWFRQAPGKEREFVASISGSGGYTYYADSVKGRFTISRDDARNTVYLQMNSLKPEDTAVYYCNVTAMRNRLLVEYWGQGTQVTVSS

SEQ ID NO: 10906 - protein, 120 aa, synthetic construct
EVQLVESGGGLVQAGDSLRLSCTASGNMLMILCMDWFRQAPGKEREFVASISSGNVYTYYADSVKGRFTISRDDARNTVYLQMNSLKPEDTAVYYCNVVTLGRAQIAEYWGQGTQVTVSS

SEQ ID NO: 10907 - protein, 120 aa, synthetic construct
EVQLVESGGGLVQAGDSLRLSCTASGSVGGILEMGWFRQAPGKEREFVASISRRGDATYYADSVKGRFTISRDDARNTVYLQMNSLKPEDTAVYYCNVTSIRTGFFVEYWGQGTQVTISS

SEQ ID NO: 10908 - protein, 120 aa, synthetic construct
EVQLVESGGGLVQAGDSLRLSCTASGLSSGLIEMGWFRQAPGKEREFVASISGDRLYTYYADSVKGRFTISRDDARNTVYLQMNSLKPEDTAVYYCNVVVLTRLMFVEYWGQGTQVTVSS

SEQ ID NO: 10909 - protein, 122 aa, synthetic construct
EVQLVESGGGLVQAGDSLRLSCTASGRFNVAIEMGWFRQAPGKEREFVASISRGGGYTYYADSVKGRFTISRDDARNTVYLQMNSLKPEDTAVYYCNVLALLSDGFRIGEYWGQGTQVTVSS

SEQ ID NO: 10910 - protein, 121 aa, synthetic construct
EVQLVESGGGLVQAGDSLRLSCTASGIGVMCIEMGWFRQAPGKEREFVASISGRGDSTYYADSVKGRFTISRDDARNTVYLQMNSLKPEDTAVYYCNVTVVVVGVGFGEYWGQGTQVTVSS

SEQ ID NO: 10911 - protein, 120 aa, synthetic construct
EVQLVESGGGLVQAGDSLRLSCTASGVSNDGLEMGWFRQAPGKEREFVASISVIGGDTYYADSVKGRFTISRDDARNTVYLQMNSLKPEDTAVYYCNVTLITIMGFSEYWGQGTQVTVSS

SEQ ID NO: 10912 - protein, 119 aa, synthetic construct
EVQLVESGGGLVQAGDSLRLSCTASGDLLRVIEMGWFRQAPGKEREFVASISGVRVYTYYADSVKGRFTISRDDARNTVYLQMNSLKPEDTAVYYCNVTVLSSVFREYWGQGTQVTVSS

SEQ ID NO: 10913 - protein, 121 aa, synthetic construct
EVQLVESGGGLVQAGDSLRLSCTASGIVWEYRMMGWFRQAPGKEREFVASISHTGVITYYADSVKGRFTISRDDARNTVYLQMNSLKPEDTAVYYCNVKSVDFDSWGFEYWGQGTQVTVSS

SEQ ID NO: 10914 - protein, 120 aa, synthetic construct
EVQLVESGGGLVQAGDSLRLSCTASGREVEVVEMGWFRQAPGKEREFVASISYATGYTYYADSVKGRFTISRDDARNTVYLQMNSLKPEDTAVYYCNVTSWRGYRFHEYWGQGTQVTVSS

SEQ ID NO: 10915 - protein, 120 aa, synthetic construct
EVQLVESGGGLVQAGDSLRLSCTASGSKDVFMEMGWFRQAPGKEREFVASISTRGRYTYYADSVKGRFTISRDDARNTVYLQMNSLKPEDTAVYYCNVTAIVMGGVLEYWGQGTQVTVSS

SEQ ID NO: 10916 - protein, 120 aa, synthetic construct
EVQLVESGGGLVQAGDSLRLSCTASGRTGNTIEMGWFRQAPGKEREFVASISNRGNYTYYADSVKGRFTISRDDARNTVYLQMNSLKPEDTAVYYCNVTSLLGSVFDEYWGQGTQVTVSS

SEQ ID NO: 10917 - protein, 119 aa, synthetic construct
EVQLVESGGGLVQAGDSLRLSCTASGDVDGVIEMGWFRQAPGKEREFVASISGRGYTTYYADSVKGRFTISRDDARNTVYLQMNSLKPEDTAVYYCNVTIIRARVSEYWGQGTQVTVSS

SEQ ID NO: 10918 - protein, 120 aa, synthetic construct
EVQLVESGGGLVQAGDSLRLSCTASGHRGQIIEMGWFRQAPGKEREFVASISMRVTYTYYADSVKGRFTISRDDARNTVYLQMNSLKPEDTAVYYCNVSGVQLGSIVEYWGQGTQVTVSS

SEQ ID NO: 10919 - protein, 120 aa, synthetic construct
EVQLVESGGGLVQAGDSLRLSCTASGVRFVFRTMGWFRQAPGKEREFVASISGFKQVTYYADSVKGRFTISRDDARNTVYLQMNSLKPEDTAVYYCNVTDDLSTNGAEYWGQGTQVTVSS

SEQ ID NO: 10920 - protein, 120 aa, synthetic construct
EVQLVESGGGLVQAGDSLRLSCTASGEVVVPVEMGWFRQAPGKEREFVASISGRSTLTYYADSVKGRFTISRDDARNTVYLQMNSLKPEDTAVYYCNVTAFNAMVFHEYWGQGTQVTVSS

SEQ ID NO: 10921 - protein, 121 aa, synthetic construct
EVQLVESGGGLVQAGDSLRLSCTASGPICHIVEMGWFRQAPGKEREFVASISFNGTYTYYADSVKGRFTISRDDARNTVYLQMNSLKPEDTAVYYCNVSSLGMHGRLLEYWGQGTQVTVSS

SEQ ID NO: 10922 - protein, 120 aa, synthetic construct
EVQLVESGGGLVQAGDSLRLSCTASGNYAVAIEMGWFRQAPGKEREFVASISVRDGLTYYADSVKGRFTISRDDARNTVYLQMNSLKPEDTAVYYCNVTSYGNSMFVEYWGQGTQVTVSS

SEQ ID NO: 10923 - protein, 121 aa, synthetic construct
EVQLVESGGGLVQAGDSLRLSCTASGREGTGIEMGWFRQAPGKEREFVASISMHGGYTYYADSVKGRFTISRDDARNTVYLQMNSLKPEDTAVYYCNVVDLDVLGKFLEYWGQGTQVTVSS

SEQ ID NO: 10924 - protein, 122 aa, synthetic construct
EVQLVESGGGLVQAGDSLRLSCTASGLGPGVIEMGWFRQAPGKEREFVASISGIHLGTYYADSVKGRFTISRDDARNTVYLQMNSLKPEDTAVYYCNVTSVDTSRRRFIEYWGQGTQVTVSS

SEQ ID NO: 10925 - protein, 120 aa, synthetic construct
EVQLVESGGGLVQAGDSLRLSCTASGLVGFTLEMGWFRQAPGKEREFVASISGVGGHTYYADSVKGRFTISRDDARNTVYLQMNSLKPEDTAVYYCNVTALSFNGFEEYWGQGTQVTVSS

SEQ ID NO: 10926 - protein, 115 aa, synthetic construct
EVQLVESGGGLVQAGDSLRLSCTASGVGDADFFMGWFRQAPGKEREFVASISDRMHHTYYADSVKGRFTISRDDARNTVYLQMNSLKPEDTAVYYCNGIVVEEYWGQGTQVTVSS

SEQ ID NO: 10927 - protein, 122 aa, synthetic construct
EVQLVESGGGLVQAGDSLRLSCTASGREVDVWSMGWFRQAPGKEREFVASISGIVNLTYYADSVKGRFTISRDDARNTVYLQMNSLKPEDTAVYYCNVWGVLFITRLFQEYWGQGTQVTVSS

SEQ ID NO: 10928 - protein, 120 aa, synthetic construct
EVQLVESGGGLVQAGDSLRLSCTASGNTGSVIEMGWFRQAPGKEREFVASISGVHVYTYYADSVKGRFTISRDDARNTVYLQMNSLKPEDTAVYYCNVISSGYRQFDEYWGQGTQVTVSS

SEQ ID NO: 10929 - protein, 120 aa, synthetic construct
EVQLVESGGGLVQAGDSLRLSCTASGWRMVFVAMGWFRQAPGKEREFVASISGFGCVTYYADSVKGRFTISRDDARNTVYLQMNSLKPEDTAVYYCNVNLENESLSSEYWGQGTQVTVSS

SEQ ID NO: 10930 - protein, 124 aa, synthetic construct
EVQLVESGGGLVQAGDSLRLSCTASGLDVLGGEMGWFRQAPGKEREFVASISIFNVVTYYADSVKGRFTISRDDARNTVYLQMNSLKPEDTAVYYCNVRGIVLKDNWAVWFEYWGQGTQVTVSS

SEQ ID NO: 10931 - protein, 121 aa, synthetic construct
EVQLVESGGGLVQAGDSLRLSCTASGMRGQVLEMGWFRQAPGKEREFVASISNKRKYTYYADSVKGRFTISRDDARNTVYLQMNSLKPEDTAVYYCNVMEIMEGLRFMEYWGQGTQVTVSS

SEQ ID NO: 10932 - protein, 121 aa, synthetic construct
EVQLVESGGGLVQAGDSLRLSCTAGGLVLTPIEMGWFRQAPGKEREFVASISGIDSSTYYADSVKGRFTISRDDARNTVYLQMNSLKPEDTAVYYCNVVIWVIGVGFFEYWGQGTQVTVSS

SEQ ID NO: 10933 - protein, 121 aa, synthetic construct
EVQLVESGGGLVQAGDSLRLSCTASGCFATVLEMGWFRQAPGKEREFVASISNKESLTYYADSVKGRFTISRDDARNTVYLQMNSLKPEDTAVYYCNVTTYLNRIGFGEYWGQGTQVTVSS

SEQ ID NO: 10934 - protein, 123 aa, synthetic construct
EVQLVESGGGLVQAGDSLRLSCTASGDAKMVVEMGWFRQAPGKEREFVASISWNGVYTYYADSVKGRFTISRDDARNTVYLQMNSLKPEDTAVYYCNVSSWLGTFGLGFEEYWGQGTQVTVSS

SEQ ID NO: 10935 - protein, 122 aa, synthetic construct
EVQLVESGGGLVQAGDSLRLSCTASGAMARKMEMGWFRQAPGKEREFVASISGRTIYTYYADSVKGRFTISRDDARNTVYLQMNSLKPEDTAVYYCNVTVVALETRGFLEYWGQGTQVTVSS

SEQ ID NO: 10936 - protein, 125 aa, synthetic construct
EVQLVESGGGLVQAGDSLRLSCTASGLTESVMEMGWFRQAPGKEREFVASISGVTSVTYYADSVKGRFTISRDDARNTVYLQMNSLKPEDTAVYYCNVTVIIMGITRPMGFVEYWGQGTQVTVSS

SEQ ID NO: 10937 - protein, 123 aa, synthetic construct
EVQLVESGGGLVQAGDSLRLSCTASGMRGLGIEMGWFRQAPGKEREFVASISMIGTMTYYADSVKGRFTISRDDARNTVYLQMNSLKPEDTAVYYCNVTVFIGSGDVRFVEYWGQGTQVTVSS

SEQ ID NO: 10938 - protein, 118 aa, synthetic construct
EVQLVESGGGLVQAGDSLRLSCTASGKVSDAVEMGWFRQAPGKEREFVASISSDTLYTYYADSVKGRFTISRDDARNTVYLQMNSLKPEDTAVYYCNVIRLSRGTEYWGQGTQVTVSS

SEQ ID NO: 10939 - protein, 121 aa, synthetic construct
EVQLVESGGGLVQAGDSLRLSCTASGSESMIIEMGWFRQAPGKEREFVASISQRFLTTYYADSVKGRFTISRDDARNTVYLQMNSLKPEDTAVYYCNVTGLSSSRFFVEYWGQGTQVTVSS

SEQ ID NO: 10940 - protein, 122 aa, synthetic construct
EVQLVESGGGLVQAGDSLRLSCTASGMTQGTVEMGWFRQAPGKEREFVASISIRVGYTYYADSVKGRFTISRDDARNTVYLQMNSLKPEDTAVYYCNVWVFRQLRMRFDEYWGQGTQVTVSS

SEQ ID NO: 10941 - protein, 120 aa, synthetic construct
EVQLVESGGGLVQAGDSLRLSCTASGWSSDFVEMGWFRQAPGKEREFVASISRDAMYTYYADSVKGRFTISRDDARNTVYLQMNSLKPEDTAVYYCNVVMVVRMEFAEYWGQGTQVTVSS

SEQ ID NO: 10942 - protein, 120 aa, synthetic construct
EVQLVESGGGLVQAGDSLRLSCTASGRNSVVLEMGWFRQAPGKEREFVASISGTSVYTYYADSVKGRFTISRDDARNTVYLQMNSLKPEDTAVYYCNVVMYNLTGLLEYWGQGTQVTVSS

SEQ ID NO: 10943 - protein, 120 aa, synthetic construct
EVQLVESGGGLVQAGDSLRLSCTASGTSHVVMEMGWFRQAPGKEREFVASISGINGLTYYADSVKGRFTISRDDARNTVYLQMNSLKPEDTAVYYCNVTVLTDHNFVEYWGQGTQVTVSS

SEQ ID NO: 10944 - protein, 120 aa, synthetic construct
EVQLVESGGGLVQAGDSLRLSCTASGSRNVVIEMGWFRQAPGKEREFVASISGSLVYTYYADSVKGRFTISRDDARNTVYLQMNSLKPEDTAVYYCNVVVVGIGGLIEYWGQGTQVTVSS

SEQ ID NO: 10945 - protein, 119 aa, synthetic construct
EVQLVESGGGLVQAGDSLRLSCTASGVGGFKLEMGWFRQAPGKEREFVASISLNSEGTYYADSVKGRFTISRDDARNTVYLQMNSLKPEDTAVYYCNVTVYDLGFREYWGQGTQVTVSS

SEQ ID NO: 10946 - protein, 120 aa, synthetic construct
EVQLVESGGGLVQAGDSLRLSCTASGCMDRTLEMGWFRQAPGKEREFVASISGRHTFTYYADSVKGRFTISRDDARNTVYLQMNSLKPEDTAVYYCNVTIVSNCIFDEYWGQGTQVTVSS

SEQ ID NO: 10947 - protein, 121 aa, synthetic construct
EVQLVESGGGLVQAGDSLRLSCTASGVFTFVFFMGWFRQAPGKEREFVASISDIGAHTYYADSVKGRFTISRDDARNTVYLQMNSLKPEDTAVYYCNVLAMGSRRTWYEYWGQGTQVTVSS

SEQ ID NO: 10948 - protein, 120 aa, synthetic construct
EVQLVESGGGLVQAGDSLRLSCTASGMDGTMLEMGWFRQAPGKEREFVASISAIGTYTYYADSVKGRFTISRDDARNTVYLQMNSLKPEDTAVYYCNVTLLERQRVLEYWGQGTQVTVSS

SEQ ID NO: 10949 - protein, 121 aa, synthetic construct
EVQLVESGGGLVQAGDSLRLSCTASGQEGTCLEMGWFRQAPGKEREFVASISMSNPYTYYADSVKGRFTISRDDARNTVYLQMNSLKPEDTAVYYCNVLMVDGDMRFAEYWGQGTQVTVSS

SEQ ID NO: 10950 - protein, 120 aa, synthetic construct
EVQLVESGGGLVQAGDSLRLSCTASGVTHMMLEMGWFRQAPGKEREFVASISGGNQHTYYADSVKGRFTISRDDARNTVYLQMNSLKPEDTAVYYCNVTVCHADGFDEYWGQGTQVTVSS

SEQ ID NO: 10951 - protein, 121 aa, synthetic construct
EVQLVESGGGLVQAGDSLRLSCTASGLRAKVIEMGWFRQAPGKEREFVASISGVDTYTYYADSVKGRFTISRDDARNTVYLQMNSLKPEDTAVYYCNVTVYHDKFLILEYWGQGTQVTVSS

SEQ ID NO: 10952 - protein, 120 aa, synthetic construct
EVQLVESGGGLVQAGDSLRLSCTASGGFLRVLEMGWFRQAPGKEREFVASISGLGDYTYYADSVKGRFTISRDDARNTVYLQMNSLKPEDTAVYYCNVVIVNRHRILEYWGQGTQVTVSS

SEQ ID NO: 10953 - protein, 120 aa, synthetic construct
EVQLVESGGGLVQAGDSLRLSCTASGITGQVLEMGWFRQAPGKEREFVASISIHSRYTYYADSVKGRFTISRDDARNTVYLQMNSLKPEDTAVYYCNVVTIDLSCFREYWGQGTQVTVSS

SEQ ID NO: 10954 - protein, 118 aa, synthetic construct
EVQLVESGGGLVQAGDSLRLSCTASGTKQHEMIMDWFRQAPGKEREFVASISTQANRTYYADSVKGRFTISRDDARNTVYLQMNSLKPEDTAVYYCNVLDVVEWSEYWGQGTQVTVSS

SEQ ID NO: 10955 - protein, 119 aa, synthetic construct
EVQLVESGGGLVQAGDSLRLSCTASGTRAFLLEMGWFRQAPGKEREFVASISGYDMSTYYADSVKGRFTISRDDARNTVYLQMNSLKPEDTAVYYCNVSRAESCECEYWGQGTQVTVSS

SEQ ID NO: 10956 - protein, 122 aa, synthetic construct
EVQLVESGGGLVQAGDSLRLSCTASGEFAGIMEMGWFRQAPGKEREFVASISGSNLYTYYADSVKGRFTISRDDARNTVYLQMNSLKPEDTAVYYCNVTQCLPASLQFSEYWGQGTQVTVSS

SEQ ID NO: 10957 - protein, 118 aa, synthetic construct
EVQLVESGGGLVQAGDSLRLSCTASGQRVVFRKMGWFRQAPGKEREFVASISGFNQATYYADSVKGRFTISRDDARNTVYLQMNSLKPEDTAVYYCNVMDEMQNREYWGQGTQVTVSS

SEQ ID NO: 10958 - protein, 117 aa, synthetic construct
EVQLVESGGGLVQAGDSLRLSCTASGCFGNMIEMGWFRQAPGKEREFVASISGSQIYTYYADSVKGRFTISRDDARNTVYLQMNSLKPEDTAVYYCNVFTKGFLEYWGQGTQVTVSS

SEQ ID NO: 10959 - protein, 119 aa, synthetic construct
EVQLVESGGGLVQAGDSLRLSCTASGFDGTTVEMGWFRQAPGKEREFVASISGLRGYTYYADSVKGRFTISRDDARNTVYLQMNSLKPEDTAVYYCNVVAYTTSFVEYWGQGTQVTVSS

SEQ ID NO: 10960 - protein, 122 aa, synthetic construct
EVQLVESGGGLVQAGDSLRLSCTASGDRTVFKMMGWFRQAPGKEREFVASISGFGGGTYYADSVKGRFTISRDDARNTVYLQMNSLKPEDTAVYYCNVMQTGSTLLGYGEYWGQGTQVTVSS

SEQ ID NO: 10961 - protein, 121 aa, synthetic construct
EVQLVESGGGLVQAGDSLRLSCTASGWRGSVIEMGWFRQAPGKEREFVASISGLAVATYYADSVKGRFTISRDDARNTVYLQMNSLKPEDTAVYYCNVTTFDRESGFMEYWGQGTQVTVSS

SEQ ID NO: 10962 - protein, 120 aa, synthetic construct
EVQLVESGGGLVQAGDSLRLSCTASGNSMFTLEMGWFRQAPGKEREFVASISSRDNWTYYADSVKGRFTISRDDARNTVYLQMNSLKPEDTAVYMQRITVFTGHRASEYWGQGTQVTVSS

SEQ ID NO: 10963 - protein, 124 aa, synthetic construct
EVQLVESGGGLVQAGDSLRLSCTASGANLFVLEMGWFRQAPGKEREFVASISGATGATYYADSVKGRFTISRDDARNTVYLQMNSLKPEDTAVYYCNVTAYKRVCTVYSFLEYWGQGTQVTVSS

SEQ ID NO: 10964 - protein, 120 aa, synthetic construct
EVQLVESGGGLVQAGDSLRLSCTASGNQSVLMEMGWFRQAPGKEREFVASISMSVAYTYYADSVKGRFTISRDDARNTVYLQMNSLKPEDTAVYYCNVSYLCAHRLVEYWGQGTQVTVSS

SEQ ID NO: 10965 - protein, 117 aa, synthetic construct
EVQLVESGGGLVQAGDSLRLSCTASGLVGSVLEMGWFRQAPGKEREFVASISSRALYTYYADSVKGRFTISRDDARNTVYLQMNSLKPEDTAVYYCNVWNVTFREYWGQGTQVTVSS

SEQ ID NO: 10966 - protein, 120 aa, synthetic construct
EVQLVESGGGLVQAGDSLRLSCTASGQQNDVMEMGWFRQAPGKEREFVASISNRNQSTYYADSVKGRFTISRDDARNTVYLQMNSLKPEDTAVYYCNVTGVGVYRFWEYWGQGTQVTVSS

SEQ ID NO: 10967 - protein, 120 aa, synthetic construct
EVQLVESGGGLVQAGDSLRLSCTASGNAHIIVEMGWFRQAPGKEREFVASISGWDTYTYYADSVKGRFTISRDDARNTVYLQMNSLKPEDTAVYYCNVVMCQVGTFREYWGQGTQVTVSS

SEQ ID NO: 10968 - protein, 120 aa, synthetic construct
EVQLVESGGGLVQAGDSLRLSCTASGVVAGAIEMGWFRQAPGKEREFVASISVRKGGTYYADSVKGRFTISRDDARNTVYLQMNSLKPEDTAVYYCNVTTISAGRIYEYWGQGTQVTVSS

SEQ ID NO: 10969 - protein, 116 aa, synthetic construct
EVQLVESGGGLVQAGDSLRLSCTASGFMEMGWFRQAPGKEREFVASISGSVGYTYYADSVKGRFTISRDDARNTVYLQMNSLKPEDTAVYYCNVVIAAVSRFDEYWGQGTQVTVSS

SEQ ID NO: 10970 - protein, 122 aa, synthetic construct
EVQLVESGGGLVQAGDSLRLSCTASGNPYGVVEMGWFRQAPGKEREFVASISSKQDYTYYADSVKGRFTISRDDARNTVYLQMNSLKPEDTAVYYCNVVVISALTVGFREYWGQGTQVTVSS

SEQ ID NO: 10971 - protein, 117 aa, synthetic construct
EVQLVESGGGLVQAGDSLRLSCTASGNQLSVMVMGWFRQAPGKEREFVAVSFLAGVTYYADSVKGRFTISRDDARNTVYLQMNSLKPEDTAVYYCRMDPANRNDEYWGQGTQVTVSS

SEQ ID NO: 10972 - protein, 120 aa, synthetic construct
EVQLVESGGGLVQAGDSLRLSCTASGNQDHTIEMGWFRQAPGKEREFVASISGVVMYTYYADSVKGRFTISRDDARNTVYLQMNSLKPEDTAVYYCNVVVVMSNMFSEYWGQGTQVTVSS

SEQ ID NO: 10973 - protein, 124 aa, synthetic construct
EVQLVESGGGLVQAGDSLRLSCTASGTLVRALCMGWFRQAPGKEREFVASISDTNGVTYYADSVKGRFTISRDDARNTVYLQMNSLKPEDTAVYYCNVFGLCAVDGRMSWWEYWGQGTQVTVSS

SEQ ID NO: 10974 - protein, 119 aa, synthetic construct
EVQLVESGGGLVQAGDSLRLSCTASGIYGGIIEMGWFRQAPGKEREFVASISGRGHGTYYADSVKGRFTISRDDARNTVYLQMNSLKPEDTAVYYCNVTSLVHSFVEYWGQGTQVTVSS

SEQ ID NO: 10975 - protein, 117 aa, synthetic construct
EVQLVESGGGLVQAGDSLRLSCTASGQASSIRTMGWFRQAPGKEREFVAVSLVCMTYYADSVKGRFTISRDDARNTVYLQMNSLKPEDTAVYYCNVEVGTSAVREYWGQGTQVTVSS

SEQ ID NO: 10976 - protein, 125 aa, synthetic construct
EVQLVESGGGLVQAGDSLRLSCTASGIRLVFKGMGWFRQAPGKEREFVASISGFNTCTYYADSVKGRFTISRDDARNTVYLQMNSLKPEDTAVYYCNVDMSDSVFSADGMNGEYWGQGTQVTVSS

SEQ ID NO: 10977 - protein, 118 aa, synthetic construct
EVQLVESGGGLVQAGDSLRLSCTASGDVGPIVEMGWFRQAPGKEREFVASIGAHTYTYYADSVKGRFTISRDDARNTVYLQMNSLKPEDTAVYYCNVTTMTETFVEYWGQGTQVTVSS

SEQ ID NO: 10978 - protein, 120 aa, synthetic construct
EVQLVESGGGLVQAGDSLRLSCTASGNRWFIIEMGWFRQAPGKEREFVASISGGTYATYYADSVKGRFTISRDDARNTVYLQMNSLKPEDTAVYYCNVTVYGSVGFREYWGQGTQVTVSS

SEQ ID NO: 10979 - protein, 119 aa, synthetic construct
EVQLVESGGGLVQAGDSLRLSCTASGTAAAMIEMGWFRQAPGKEREFVASISGMSLYTYYADSVKGRFTISRDDARNTVYLQMNSLKPEDTAVYYCNVTVLAIVFREYWGQGTQVTVSS

SEQ ID NO: 10980 - protein, 122 aa, synthetic construct
EVQLVESGGGLVQAGDSLRLSCTASGTMDEQVEMGWFRQAPGKEREFVASISCHMAYTYYADSVKGRFTISRDDARNTVYLQMNSLKPEDTAVYYCNVVKLRIQAMSFVEYWGQGTQVTVSS

SEQ ID NO: 10981 - protein, 120 aa, synthetic construct
EVQLVESGGGLVQAGDSLRLSCTASGTTVGMLEMGWFRQAPGKEREFVASISIVREETYYADSVKGRFTISRDDARNTVYLQMNSLKPEDTAVYYCNVTVVDWMSFKEYWGQGTQVTVSS

SEQ ID NO: 10982 - protein, 119 aa, synthetic construct
EVQLVESGGGLVQAGDSLRLSCTASGLRAGGVEMGWFRQAPGKEREFVASISLLYVYTYYADSVKGRFTISRDDARNTVYLQMNSLKPEDTAVYYCNVSVIKNGLVEYWGQGTQVTVSS

SEQ ID NO: 10983 - protein, 118 aa, synthetic construct
EVQLVESGGGLVQAGDSLRLSCTASGVGCDWLEMGWFRQAPGKEREFVASISNRHMYTYYADSVKGRFTISRDDARNTVYLQMNSLKPEDTAVYYCNVTCLWSFSEYWGQGTQVTVSS

SEQ ID NO: 10984 - protein, 121 aa, synthetic construct
EVQLVESGGGLVQAGDSLRLSCTASGEPVTMMWMGWFRQAPGKEREFVASISTVGGGTYYADSVKGRFTISRDDARNTVYLQMNSLKPEDTAVYYCNVICKLSTGRWNEYWGQGTQVTVSS

SEQ ID NO: 10985 - protein, 119 aa, synthetic construct
EVQLVESGGGLVQAGDSLRLSCTASGTHKSYLEMGWFRQAPGKEREFVASISMTKDTYYADSVKGRFTISRDDARNTVYLQMNSLKPEDTAVYYCNVCTVVLWGFQEYWGQGTQVTVSS

SEQ ID NO: 10986 - protein, 119 aa, synthetic construct
EVQLVESGGGLVQAGDSLRLSCTASGVGGHIVEMGWFRQAPGKEREFVASISRTMLYTYYADSVKGRFTISRDDARNTVYLQMNSLKPEDTAVYYCNVVLFQDRFIEYWGQGTQVTVSS

SEQ ID NO: 10987 - protein, 121 aa, synthetic construct
EVQLVESGGGLVQAGDSLRLSCTASGSSNVCLEMGWFRQAPGKEREFVASISGRILYTYYADSVKGRFTISRDDARNTVYLQMNSLKPEDTAVYYCNVVVWSCDGRIVEYWGQGTQVTVSS

SEQ ID NO: 10988 - protein, 120 aa, synthetic construct
EVQLVESGGGLVQAGDSLRLSCTASGGYHLILFMGWFRQAPGKEREFVASISGMQGMTYYADSGKGRFTISRDDARNTVYLQMNSLKPEDTAVYYCNVWGVSNGLFMEYWGQGTQVTVSS

SEQ ID NO: 10989 - protein, 120 aa, synthetic construct
EVQLVESGGGLVQAGDSLRLSCTASGGCADAIEMGWFRQAPGKEREFVASISSAAQYTYYADSVKGRFTISRDDARNTVYLQMNSLKPEDTAVYYCNVTAVSRGNIREYWGQGTQVTVSS

SEQ ID NO: 10990 - protein, 120 aa, synthetic construct
EVQLVESGGGLVQAGDSLRLSCTASGDTGLPIEMGWFRQAPGKEREFVASISMMGVYTYYADSVKGRFTISRDDARNTVYLQMNSLKPEDTAVYYCNVTSFMGVVRVEYWGQGTQVTVSS

SEQ ID NO: 10991 - protein, 125 aa, synthetic construct
EVQLVESGGGLVQAGDSLRLSCTASGIEWVGGQMGWFRQAPGKEREFVASISVSRGNTYYADSVKGRFTISRDDARNTVYLQMNSLKPEDTAVYYCNVLGFTNSKKDGLLVVEYWGQGTQVTVSS

SEQ ID NO: 10992 - protein, 120 aa, synthetic construct
EVQLVESGGGLVQAGDSLRLSCTASGGLDTVIEMGWFRQAPGKEREFVASISGRSVYTYYADSVKGRFTISRDDARNTVYLQMNSLKPEDTAVYYCNVMLVTSGLIVEYWGQGTQVTVSS

SEQ ID NO: 10993 - protein, 117 aa, synthetic construct
EVQLVESGGGLVQAGDSLRLSCTASGMRGSVVKMGWFRQAPGKEREFVASISGVADVTYYADSVKGRFTISRDDARNTVYLQMNSLKPEDTAVYYCNVLTDRIIEYWGQGTQVTVSS

SEQ ID NO: 10994 - protein, 119 aa, synthetic construct
EVQLVESGGGLVQAGDSLRLSCTASGHLKHVLEMGWFRQAPGKEREFVASISGTGARTYYADSVKGRFTISQDDARNTVYLQMNSLKPEDTAVYYCNVTAWERVFNEYWGQGTQVTVSS

SEQ ID NO: 10995 - protein, 121 aa, synthetic construct
EVQLVESGGGLVQAGDSLRLSCTASGTAGASVEMGWFRQAPGKEREFVASISARVQYTYYADSVKGRFTISRDDARNTVYLQMNSLKPEDTAVYYCNVVVLHVLYGFVEYWGQGTQVTVSS

SEQ ID NO: 10996 - protein, 125 aa, synthetic construct
EVQLVESGGGLVQAGDSLRLSCTASGSVGRVIEMGWFRQAPGKEREFVASISGLVYATYYADSVKGRFTISRDDARNTVYLQMNSLKPEDTAVYYCNVTALGSSAGVQVAFREYWGQGTQVTVSS

SEQ ID NO: 10997 - protein, 119 aa, synthetic construct
EVQLVESGGGLVQAGDSLRLSCTASGSYGAPLGMGWFRQAPGKEREFVAVYYNTFGTYYADSVKGRFTISRDDARNTVYLQMNSLKPEDTAVYYCNVDSMVRGRYMEYWGQGTQVTVSS

SEQ ID NO: 10998 - protein, 121 aa, synthetic construct
EVQLVESGGGLVQAGDSLRLSCTASGPKASRLEMGWFRQAPGKEREFVASISDSHVGTYYADSVKGRFTISRDDARNTVYLQMNSLKPEDTAVYYCNVVFYIPFRWFVEYWGQGTQVTVSS

SEQ ID NO: 10999 - protein, 118 aa, synthetic construct
EVQLVESGGGLVQAGDSLRLSCTASGMGERFMLMGWFRQAPGKEREFVASISCNVDWTYYADSVKGRFTISRDDARNTVYLQMNSLKPEDTAVYYCNVIAVQPIMEYWGQGTQVTVSS

SEQ ID NO: 11000 - protein, 119 aa, synthetic construct
EVQLVESGGGLVQAGDSLRLSCTASGGTVGIVEMGWFRQAPGKEREFVASISTHGRYTYYADSVKGRFTISRDDARNTVYLQMNSLKPEDTAVYYCNVTVIKTVISEYWGQGTQVTVSS

SEQ ID NO: 11001 - protein, 120 aa, synthetic construct
EVQLVESGGGLVQAGDSLRLSCTASGKRATVIEMGWFRQAPGKEREFVASISGLRTLTYYADSVKGRFTISRDDARNTVYLQMNSLKPEDTAVYYCNVTGFNGRFFDEYWGQGTQVTVSS

SEQ ID NO: 11002 - protein, 120 aa, synthetic construct
EVQLVESGGGLVQAGDSLRLSCTASGLVHNVLEMGWFRQAPGKEREFVASISKQTVYTYYADSVKGRFTISRDDARNTVYLQMNSLKPEDTAVYYCNVTNLGRNGLKEYWGQGTQVTVSS

SEQ ID NO: 11003 - protein, 119 aa, synthetic construct
EVQLVESGGGLVQAGDSLRLSCTASGFMQGFTRMGWFRQAPGKEREFVASISGANGSTYYADSVKGRFTISRDDARNTVYLQMNSLKPEDTAVYYCNVLIVWGSWAEYWGQGTQVTVSS

SEQ ID NO: 11004 - protein, 120 aa, synthetic construct
EVQLVESGGGLVQAGDSLRLSCTASGNIGDLIEMGWFRHAPGKEREFVASISGVGDYTYYADSVKGRFTISRDDARNTVYLQMNSLKPEDTAVYYCNVSVFVYVRLKEYWGQGTQVTVSS

SEQ ID NO: 11005 - protein, 119 aa, synthetic construct
EVQLVESGGGLVQAGDSLRLSCTASGDSIEVLEMGWFRQAPGKEREFVASISVKDYNTYYADSVKGRFTISRDDARNTVYLQMNSLKPEDTAVYYCNVTMAVPFGREYWGQGTQVTVSS

SEQ ID NO: 11006 - protein, 120 aa, synthetic construct
EVQLVESGGGLVQAGDSLRLSCTASGKNMMIMAMDWFRQAPGKEREFVASISNMLAYTYYADSVKGRFTISRDDARNTVYLQMNSLKPEDTAVYYCNVLLVADRGFNEYWGQGTQVTVSS

SEQ ID NO: 11007 - protein, 120 aa, synthetic construct
EVQLVESGGGLVQAGDSLRLSCTASGMKPMVIEMGWFRQAPGKEREFVASISGRGGSTYYADSVKGRFTISRDDARNTVYLQMNSLKPEDTAVYYCNVTCFDGMTKSEYWGQGTQVTVSS

SEQ ID NO: 11008 - protein, 121 aa, synthetic construct
EVQLVESGGGLVQAGDSLRLSCTASGVNGGIMEMGWFRQAPGKEREFVASISSRTAWTYYADSVKGRFTISRDDARNTVYLQMNSLKPEDTAVYYCNVVVVTKARGFSEYWGQGTQVTVSS

SEQ ID NO: 11009 - protein, 119 aa, synthetic construct
EVQLVESGGGLVQAGDSLRLSCTASGSKQYAVEMGWFRQAPGKEREFVASISGDAGYTYYADSVKGRFTISRDDARNTVYLQMNSLKPEDTAVYYCNVWLYTSGFEEYWGQGTQVTVSS

SEQ ID NO: 11010 - protein, 120 aa, synthetic construct
EVQLVESGGGLVQAGDSLRLSCTASGPRIVFRDMGWFRQAPGKEREFVASISGFGSVTYYADSVKGRFTISRDDARNTVYLQMNSLKPEDTAVYYCNVTGFDPNLMVEYWGQGTQVTVSS

SEQ ID NO: 11011 - protein, 119 aa, synthetic construct
EVQLVESGGGLVQAGDSLRLSCTASGDLVSALEMGWFRQAPGKEREFVASISCIAGVTYYADSVKGRFTISRDDARNTVYLQMNSLKPEDTAVYYCNVTTFREVFNEYWGQGTQVTVSS

SEQ ID NO: 11012 - protein, 124 aa, synthetic construct
EVQLVESGGGLVQAGDSLRLSCTASGIASTPLEMGWFRQAPGKEREFVASISGRNEQTYYADSVKGRFTISRDDARNTVYLQMNSLKPEDTAVYYCNVTIVYHCALNGWFREYWGQGTQVTVSS

SEQ ID NO: 11013 - protein, 121 aa, synthetic construct
EVQLVESGGGLVQAGDSLRLSCTASGPLTDMLAMDWFRQAPGKEREFVASISTRLLYTYYADSVKGRFTISRDDARNTVYLQMNSLKPEDTAVYYCNVLSVQRVNGFREYWGQGTQVTVSS

SEQ ID NO: 11014 - protein, 120 aa, synthetic construct
EVQLVESGGGLVQAGDSLRLSCTASGRLNGLIEMGWFRQAPGKEREFVASISASSAYTYYADSVKGRFAISRDDARNTVYLQMNSLKPEDTAVYYCNVVVVGNALFREYWGQGTQVTVSS

SEQ ID NO: 11015 - protein, 117 aa, synthetic construct
EVQLVESGGGLVQAGDSLRLSCTASGGCVAVIEMGWFRQAPGKEREFVASISRVGCYTYYADSVKGRFTISRDDARNTVYLQMNSLKPEDTAVYYCNVWNVRFKEYWGQGTQVTVSS

SEQ ID NO: 11016 - protein, 120 aa, synthetic construct
EVQLVESGGGLVQAGDSLRLSCTASDLTISVIEMGWFRQAPGKEREFVASISGMVTWTYYADSVKGRFTISRDDARNTVYLQMNSLKPEDTAVYYCNVTGFGRGKFIEYWGQGTQVTVSS

SEQ ID NO: 11017 - protein, 119 aa, synthetic construct
EVQLVESGGGLVQAGDSLRLSCTASGMSQDAVEMGWFRQAPGKEREFVASISGSVRYTYYADSVKGRFTISRDDARNTVYLQMNSLKPEDTAVYYCNVTVLLRSFWEYWGQGTQVTVSS

SEQ ID NO: 11018 - protein, 120 aa, synthetic construct
EVQLVESGGGLVQAGDSLRLSCTASGNIFPILEMGWFRQAPGKEREFVASISYVGEYTYYADSVKGRFTISRDDARNTVYLQMNSLKPEDTAVYYCNVVRVGPCCFTEYWGQGTQVTVSS

SEQ ID NO: 11019 - protein, 119 aa, synthetic construct
EVQLVESGGGLVQAGDSLRLSCTASGDSKTILEMGWFRQAPGKEREFVASISGGNTYTYYADSVKGRFTISRDDARNTVYLQMNSLKPEDTAVYYCNVISVKKGFYEYWGQGTQVTVSS

SEQ ID NO: 11020 - protein, 120 aa, synthetic construct
EVQLVESGGGLVQAGDSLRLSCTASGKSNGVLEMGWFRQAPGKEREFVASISGTSMRTYYADSVKGRFTISRDDARNTVYLQMNSLKPEDTAVYYCNVTFWRAGNFEEYWGQGTQVTVSS

SEQ ID NO: 11021 - protein, 121 aa, synthetic construct
EVQLVESGGGLVQAGDSLRLSCTASGSRGPQIEMGWFRQAPGKEREFVASISVSVRYTYYADSVKGRFTISRDDARNTVYLQMNSLKPEDTAVYYCNVVGLDTHIGFVEYWGQGTQVTVSS

SEQ ID NO: 11022 - protein, 120 aa, synthetic construct
EVQLVESGGGLVQAGDSLRLSCTASGNVDGMLEMGWFRQAPGKEREFVASISKHQGCTYYADSVKGRFTISRDDARNTVYLQMNSLKPEDTAVYYCNVTAFRSERFSEYWGQGTQVTVSS

SEQ ID NO: 11023 - protein, 119 aa, synthetic construct
EVQLVESGGGLVQAGDSLRLSCTASGQLNNMLEMGWFRQAPGKEREFVASISVTSRYTYYADSVKGRFTISRDDARNTVYLQMNSLKPEDTAVYYCNVVIWISGFAEYWGQGTQVTVSS

SEQ ID NO: 11024 - protein, 122 aa, synthetic construct
EVQLVESGGGLVQAGDSLRLSCTASGYRQGLVEMGWFRQAPGKEREFVASISVRDAWTYYADSVKGRFTISRDDARNTVYLQMNSLKPEDTAVYYCNVSGFDPNGGLKVEYWGQGTQVTVSS

SEQ ID NO: 11025 - protein, 121 aa, synthetic construct
EVQLVESGGGLVQAGDSLRLSCTASGNRGHIIEMGWFRQAPGKEREFVASISGSHEYTYYADSVKGRFTISRDDARNTVYLQMNSLKPEDTAVYYCNVASFTVLGGIVEYWGQGTQVTVSS

SEQ ID NO: 11026 - protein, 124 aa, synthetic construct
EVQLVESGGGLVQAGDSLRLSCTASGKVVNVLEMGWFRQAPGKEREFVASISGHSGYTYYADSVKGRFTISRDDARNTVYLQMNSLKPEDTAVYYCNVWFVDLHIDGIKLNEYWGQGTQVTVSS

SEQ ID NO: 11027 - protein, 122 aa, synthetic construct
EVQLVESGGGLVQAGDSLRLSCTASGSNYHLLEMGWFRQAPGKEREFVASISGRGRLTYYADSVKGRFTISRDDARNTVYLQMNSLKPEDTAVYYCNVTVVDSINLFFIEYWGQGTQVTVSS

SEQ ID NO: 11028 - protein, 124 aa, synthetic construct
EVQLVESGGGLVQAGDSLRLSCTASGVKEKWLNMGWFRQAPGKEREFVASISVGVRSTYYADSVKGRFTISRDDARNTVYLQMNSLKPEDTAVYYCNVLTESREVGYVLWHEYWGQGTQVTVSS

SEQ ID NO: 11029 - protein, 119 aa, synthetic construct
EVQLVESGGGLVQAGDSLRLSCTASGMMGDLLEMGWFRQAPGKEREFVASISVRRVWTYYADSVKGRFTISRDDARNTVYLQMNSLKPEDTAVYYCNVTALDRTFAEYWGQGTQVTVSS

SEQ ID NO: 11030 - protein, 118 aa, synthetic construct
EVQLVESGGGLVQAGDSLRLSCTASGIVEGRTLMGWFRQAPGKEREFVASISDTTSHTYYADSVKGRFTISRDDARNTVYLQMNSLKPEDTAVYYCNVLVWTRWIEYWGQGTQVTVSS

SEQ ID NO: 11031 - protein, 120 aa, synthetic construct
EVQLVESGGGLVQAGDSLRLSCTASGMRGLMLEMGWFRQAPGKEREFVASISLRGIYTYYADSVKGRFTISRDDARNTVYLQMNSLKPEDTAVYYCNVVTLAAVKFQEYWGQGTQVTVSS

SEQ ID NO: 11032 - protein, 120 aa, synthetic construct
EVQLVESGGGLVQAGDSLRLSCTASGRVSQLLGMDWFRQAPGKEREFVASISVTVMYTYYADSVKGRFTISRDDARNTVYLQMNSLKPEDTAVYYCNVLMCSGGRFVEYWGQGTQVTVSS

SEQ ID NO: 11033 - protein, 120 aa, synthetic construct
EVQLVESGGGLVQAGDSLRLSCTASGNYAMAMEMGWFRQAPGKEREFVASISMASWYTYYADSVKGRFTISRDDARNTVYLQMNSLKPEDTAVYYCNVTVFKRKVIEEYWGQGTQVTVSS

SEQ ID NO: 11034 - protein, 120 aa, synthetic construct
EVQLVESGGGLVQAGDSLRLSCTASGKGAVMLEMGWFRQAPGKEREFVASISISGGYTYYADSVKGRFTISRDDARNTVYLQMNSLKPEDTAVYYCNVSGLTNRGFAEYWGQGTQVTVSS

SEQ ID NO: 11035 - protein, 124 aa, synthetic construct
EVQLVESGGGLVQAGDSLRLSCTASGGKQGQVEMGWFRQAPGKEREFVASISGYGMYTYYADSVKGRFTISRDDARNTVYLQMNSLKPEDTAVYYCNVTKVGIASGVMHIVEYWGQGTQVTVSS

SEQ ID NO: 11036 - protein, 120 aa, synthetic construct
EVQLVESGGGLVQAGDSLRLSCTASGTYMESILMGWFRQAPGKEREFVASISFGRMATYYADSVKGRFTISRDDARNTVYLQMNSLKPEDTAVYYCNVLRHGPGLWMEYWGQGTQVTVSS

SEQ ID NO: 11037 - protein, 124 aa, synthetic construct
EVQLVESGGGLVQAGDSLRLSCTASGVVGSALEMGWFRQAPGKEREFVASISGVGIYTYYADSVKGRFTISRDDARNTVYLQMNSLKPEDTAVYYCNVLMIGDGRIGTSIIEYWGQGTQVTVSS

SEQ ID NO: 11038 - protein, 123 aa, synthetic construct
EVQLVESGGGLVQAGDSLRLSCTASGVRIVFRDMGWFRQAPGKEREFVASISWCWVRTYYADSVKGRFTISRDDARNTVYLQMNSLKPEDTAVYYCNVIRENSDLNVRRDEYWGQGTQVTVSS

SEQ ID NO: 11039 - protein, 120 aa, synthetic construct
EVQLVESGGGLVQAGDSLRLSCTASGNRVGRIEMGWFRQAPGKEREFVASISVRKDLTYYADSVKGRFTISRDDARNTVYLQMNSLKPEDTAVYYCNVTVFADVRFVEYWGQGTQVTVSS

SEQ ID NO: 11040 - protein, 120 aa, synthetic construct
EVQLVESGGGLVQAGDSLRLSCTASGDSAKVLEMGWFRQAPGKEREFVASISRSMTYTYYADSVKGRFTISRDDARNTVYLQMNSLKPEDTAVYYCNVTMVQTISISEYWGQGTQVTVSS

SEQ ID NO: 11041 - protein, 120 aa, synthetic construct
EVQLVESGGGLVQAGDSLRLSCTASGIGHEQLEMGWFRQAPGKEREFVASISVRRGETYYADSVKGRFTISRDDARNTVYLQMNSLKPEDTAVYYCNVTRVSLQGFVEYWGQGTQVTVSS

SEQ ID NO: 11042 - protein, 119 aa, synthetic construct
EVQLVESGGGLVQAGDSLRLSCTASGRLGHLLEMGWFRQAPGKEREFVASISVRSVYTYYADSVKGRFTISRDDARNTVYLQMNSLKPEDTAVYYCNVTAITGGVVEYWGQGTQVTVSS

SEQ ID NO: 11043 - protein, 121 aa, synthetic construct
EVQLVESGGGLVQAGDSLRLSCTASGCVDQVIEMGWFRQAPGKEREFVASISGRATMTYYADSVKGRFTISRDDARNTVYLQMNSLKPEDTAVYYCNVVRYSVSRFFEEYWGQGTQVTVSS

SEQ ID NO: 11044 - protein, 121 aa, synthetic construct
EVQLVESGGGLVQAGDSLRLSCTASGMWHRHEDMGWFRQAPGKEREFVASISGATGVTYYADSVKGRFTISRDDARNTVYLQMNSLKPEDTAVYYCNVRVVRVLVVFGEYWGQGTQVTVSS

SEQ ID NO: 11045 - protein, 119 aa, synthetic construct
EVQLVESGGGLVQAGDSLRLSCTASGNIDHAIEMGWFRQAPGKEREFVASISVKAGHTYYADSVKGRFTISRDDARNTVYLQMNSLKPEDTAVYYCNVTVIDHRVLEYWGQGTQVTVSS

SEQ ID NO: 11046 - protein, 121 aa, synthetic construct
EVQLVESGGGLVQAGDSLRLSCTASGIIGKVMEMGWFRQAPGKEREFVASISGDGLYTYYADSVKGRFTISRDDARNTVYLQMNSLKPEDTAVYYCNVIQWNVKDGRREYWGQGTQVTVSS

SEQ ID NO: 11047 - protein, 121 aa, synthetic construct
EVQLVESGGGLVQAGDSLRLSCTASGSHMVLIEMGWFRQAPGKEREFVASISGIVDYTYYADSVKGRFTISRDDARNTVYLQMNSLKPEDTAVYYCNVVTLMKNGTIIEYWGQGTQVTVSS

SEQ ID NO: 11048 - protein, 121 aa, synthetic construct
EVQLVESGGGLVQAGDSLRLSCTASGLHSVVLEMGWFRQAPGKEREFVASISVMGDYTYYADSVKGRFTISRDDARNTVYLQMNSLKPEDTAVYYCNVTGIRNGFRFMEYWGQGTQVTVSS

SEQ ID NO: 11049 - protein, 120 aa, synthetic construct
EVQLVESGGGLVQAGDSLRLSCTASGHLERVLEMGWFRQAPGKEREFVASISMRAAYTYYADSVKGRFTISRDDARNTVYLQMNSLKPEDTAVYYCNVTECDYAGVKEYWGQGTQVTVSS

SEQ ID NO: 11050 - protein, 111 aa, synthetic construct
EVQLVESGGGLVQAGDSLRLSCTASGGMMLESVMGWFRQAPGKEREFVAIYLGMGTYYADSVKGRFTISRDDARNTVYLQMNSLKPEDTAVYYCNVGFEYWGQGTQVTVSS

SEQ ID NO: 11051 - protein, 121 aa, synthetic construct
EVQLVESGGGLVQAGDSLRLSCTASGGSGVFIEMGWFRQAPGKEREFVASISGMGTYTYYADSVKGRFTISRDDARNTVYLQMNSLKPEDTAVYYCNVSMFRSDIGLVEYWGQGTQVTVSS

SEQ ID NO: 11052 - protein, 121 aa, synthetic construct
EVQLVESGGGLVQAGDSLRLSCTASGLSGRIIEMGWFRQAPGKEREFVASISGDSRYTYYADSVKGRFTISRDDARNTVYLQMNSLKPEDTAVYYCNVLYIEDKGGIVEYWGQGTQVTVSS

SEQ ID NO: 11053 - protein, 121 aa, synthetic construct
EVQLVESGGGLVQAGDSLRLSCTASGFVVVFKDMGWFRQAPGKEREFVASISGYRWITYYADSVKGRFTISRDDARNTVYLQMNSLKPEDTAVYYCNRMPALMQTGDDEYWGQGTQVTVSS

SEQ ID NO: 11054 - protein, 120 aa, synthetic construct
EVQLVESGGGLVQAGDSLRLSCTASGSQDNVLEMGWFRQAPGKEREFVASISGKMPYTYYADSVKGRFTISRDDARNTVYLQMNSLKPEDTAVYYCNVTKFTIYYFSEYWGQGTQVTVSS

SEQ ID NO: 11055 - protein, 117 aa, synthetic construct
EVQLVESGGGLVQAGDSLRLSCTASGTRHVFMEMGWFRQAPGKEREFVASISVRDSGTYYADSVKGRFTISRDDARNTVYLQMNSLKPEDTAVYYCNVTDTVFNEYWGQGTQVTVSS

SEQ ID NO: 11056 - protein, 120 aa, synthetic construct
EVQLVESGGGLVQAGDSLRLSCTASGTLTSVIEMGWFRQAPGKEREFVASISGNNGCTYYADSVKGRFTISRDDARNTVYLQMNSLKPEDTAVYYCNVTVHRAGGFVEYWGQGTQVTVSS

SEQ ID NO: 11057 - protein, 122 aa, synthetic construct
EVQLVESGGGLVQAGDSLRLSCTASGNYANSLDMGWFRQAPGKEREFVASISSRITYTYYADSVKGRFTISRDDARNTVYLQMNSLKPEDTAVYYCNVTVVKDVAPFIVEYWGQGTQVTVSS

SEQ ID NO: 11058 - protein, 119 aa, synthetic construct
EVQLVESGGGLVQAGDSLRLSCTASGLAHRVIEMGWFRQAPGKEREFVASISGTGGVTYYADSVKGRFTISRDDARNTVYLQMNSLKPEDTAVYYCNVTVWQVQFAEYWGQGTQVTVSS

SEQ ID NO: 11059 - protein, 121 aa, synthetic construct
EVQLVESGGGLVQAGDSLRLSCTASGVMDSIIEMGWFRQAPGKEREFVASISGNSSNTYYADSVKGRFTISRDDARNTVYLQMNSLKPEDTAVYYCNVTYLTALILFGEYWGQGTQVTVSS

SEQ ID NO: 11060 - protein, 121 aa, synthetic construct
EVQLVESGGGLVQAGDSLRLSCTASGDIALVMEMGWFRQAPGKEREFVASISGARSATYYADSVKGRFTISRDDARNTVYLQMNSLKPEDTAVYYCNVTGLMGSVGFIEYWGQGTQVTVSS

SEQ ID NO: 11061 - protein, 113 aa, synthetic construct
EVQLVESGGGLVQAGDSLRLSCTASGIAVLGSIMGWFRQAPGKEREFVASISGGARWTYYADSVKGRFTISRDDARNTVYLQMNSLKPEDTAVYYCNVDGEYWGQGTQVTVSS

SEQ ID NO: 11062 - protein, 118 aa, synthetic construct
EVQLVESGGGLVQAGDSLRLSCTASGRRAAGLAMGWFRQAPGKEREFVASISGDGARTYYADSVKGRFTISRDDARNTVYLQMNSLKPEDTAVYYCNVRKLRWDMEYWGQGTQVTVSS

SEQ ID NO: 11063 - protein, 120 aa, synthetic construct
EVQLVESGGGLVQAGDSLRLSCTASGLQATVLEMGWFRQAPGKEREFVASISGSKTYTYYADSVKGRFTISRDDARNTVYLQMNSLKPEDTAVYYCNVSVLGARSVDEYWGQGTQVTVSS

SEQ ID NO: 11064 - protein, 120 aa, synthetic construct
EVQLVESGGGLVQAGDSLRLSCTASGIYHDLMEMGWFRQAPGKEREFVASISGYQTYTYYADSVKGRFTISRDDARNTVYLQMNSLKPEDTAVYYCNVTRRQGHGFREYWGQGTQVTVSS

SEQ ID NO: 11065 - protein, 119 aa, synthetic construct
EVQLVESGGGLVQAGDSLRLSCTASGSLGMALEMGWFRQAPGKEREFVASISVTVGYTYYADSVKGRFTISRDDARNTVYLQMNSLKPEDTAVYYCNVTALTGYFREYWGQGTQVTVSS

SEQ ID NO: 11066 - protein, 120 aa, synthetic construct
EVQLVESGGGLVQAGDSLRLSCTASGDFRGLIEMGWFRQAPGKEREFVASISEHQQYTYYADSVKGRFTISRDDARNTVYLQMNSLKPEDTAVYYCNVTLMARGHFSEYWGQGTQVTVSS

SEQ ID NO: 11067 - protein, 120 aa, synthetic construct
EVQLVESGGGLVQAGDSLRLSCTACGLSSNVVEMGWFRQAPGKEREFVASISGDGSYTYYADSVKGRFTISRDDARNTVYLQMNSLKPEDTAVYYCNVSVWGVGVFYEYWGQGTQVTVSS

SEQ ID NO: 11068 - protein, 120 aa, synthetic construct
EVQLVESGGGLVQAGDSLRLSCTASGMLDGTMEMGWFRQAPGKEREFVASISGQSQYTYYADSVKGRFTISRDDARNTVYLQMNSLKPEDTAVYYCNVVTMLARRIREYWGQGTQVTVSS

SEQ ID NO: 11069 - protein, 123 aa, synthetic construct
EVQLVESGGGLVQAGDSLRLSCTASGDVATIIEMGWFRQAPGKEREFVASISEGSRYTYYADSVKGRFTISRDDARNTVYLQMNSLKPEDTAVYYCNVVAFRSRNGMAFMEYWGQGTQVTVSS

SEQ ID NO: 11070 - protein, 121 aa, synthetic construct
EVQLVESGGGLVQAGDSLRLSCTASGGASKLMEMGWFRQAPGKEREFVASISGVMTYTYYADSVKGRFTISRDDARNTVYLQMNSLKPEDTAVYYCNVVTFDLVNLFTEYWGQGTQVTVSS

SEQ ID NO: 11071 - protein, 117 aa, synthetic construct
EVQLVESGGGLVQAGDSLRLSCTASGKTHTTVEMGWFRQAPGKEREFVASISSVSDYTYYADSVKGRFTISRDDARNTVYLQMNSLKPEDTAVYYCNVWTRLFEEYWGQGTQVTVSS

SEQ ID NO: 11072 - protein, 120 aa, synthetic construct
EVQLVESGGGLVQAGDSLRLSCTASGDVNKLIEMGWFRQAPGKEREFVASISVRHHTTYYADSVKGRFTISRDDARNTVYLQMNSLKPEDTAVYYCNVVSVTIHGFDEYWGQGTQVTVSS

SEQ ID NO: 11073 - protein, 124 aa, synthetic construct
EVQLVESGGGLVQAGDSLRLSCTASGGTADFIEMGWFRQAPGKEREFVASISVHHDYTYYADSVKGRFTISRDDARNTVYLQMNSLKPEDTAVYYCNVTVFSIRTNDNGKLEYWGQGTQVTVSS

SEQ ID NO: 11074 - protein, 126 aa, synthetic construct
EVQLVESGGGLVQAGDSLRLSCTASGRVCELLDMGCVGMGWFRQAPGKEREFVASISGASTVTYYADSVKGRFTISRDDARNTVYLQMNSLKPEDTAVYYCGMVFLPRVVMCVEYWGQGTQVTVSS

SEQ ID NO: 11075 - protein, 120 aa, synthetic construct
EVQLVESGGGLVQAGDSLRLSCTASGDCGELVEMGWFRQAPGKEREFVASISALARYTYYADSVKGRFTISRDDARNTVYLQMNSLKPEDTAVYYCNVVLVYRGRFREYWGQGTQVTVSS

SEQ ID NO: 11076 - protein, 117 aa, synthetic construct
EVQLVESGGGLVQAGDSLRLSCTASGRLERAMEMGWFRQAPGKEREFVASISVNLSYTYYADSVKGRFTISRDDARNTVYLQMNSLKPEDTAVYYCNVTNFTFCEYWGQGTQVTVSS

SEQ ID NO: 11077 - protein, 120 aa, synthetic construct
EVQLVESGGGLVQAGDSLRLSCTASGRCEMMLCMGWFRQAPGKEREFVASISNRAEETYYADSVKGRFTISRDDARNTVYLQMNSLKPEDTAVYYCNVTMVVVRGFVEYWSQGTQVTVSS

SEQ ID NO: 11078 - protein, 121 aa, synthetic construct
EVQLVESGGGLVQAGDSLRLSCTASGCQGSSMEMGWFRQAPGKEREFVASISVRVDYTYYADSVKGRFTISRDDARNTVYLQMNSLKPEDTAVYYCNVIGVLNTGRFIEYWGQGTQVTVSS

SEQ ID NO: 11079 - protein, 122 aa, synthetic construct
EVQLVESGGGLVQAGDSLRLSCTASGIRGLVIEMGWFRQAPGKEREFVASISGWREYTYYADSVKGRFTISRDDARNTVYLQMNSLKPEDTAVYYCNVVDYVGTLGGFTEYWGQGTQVTVSS

SEQ ID NO: 11080 - protein, 120 aa, synthetic construct
EVQLVESGGGLVQAGDSLRLSCTASGSHGDLIEMGWFRQAPGKEREFVASISGIGWYTYYADSVKGRFTISRDDARNTVYLQMNSLKPEDTAVYYCNVWLMKEVTFVEYWGQGTQVTVSS

SEQ ID NO: 11081 - protein, 120 aa, synthetic construct
EVQLVESGGGLVQAGDSLRLSCTASGNNGVVIEMGWFRQAPGKEREFVASISGFHQDTYYADSVKGRFTISRDDARNTVYLQMNSLKPEDTAVYYCNVIDTWVSGRDEYWGQGTQVTVSS

SEQ ID NO: 11082 - protein, 120 aa, synthetic construct
EVQLVESGGGLVQAGDSLRLSCTASGYIGRILEMGWFRQAPGKEREFVASISGGHGLTYYADSVKGRFTISRDDARNTVYLQMNSLKPEDTAVYYCNVTYFSNVVFVEYWGQGTQVTVSS

SEQ ID NO: 11083 - protein, 120 aa, synthetic construct
EVQLVESGGGLVQAGDSLRLSCTASGSVPGKVEMGWFRQAPGKEREFVASISAVRVYTYYADSVKGRFTISRDDARNTVYLQMNSLKPEDTAVYYCNVTQMDGGRFNEYWGQGTQVTVSS

SEQ ID NO: 11084 - protein, 124 aa, synthetic construct
EVQLVESGGGLVQAGDSLRLSCTASGISGNVLEMGWFRQAPGKEREFVASISSEPGYTYYADSVKGRFTISRDDARNTVYLQMNSLKPEDTAVYYCNVVWWGWVPNYHGFLEYWGQGTQVTVSS

SEQ ID NO: 11085 - protein, 119 aa, synthetic construct
EVQLVESGGGLVQAGDSLRLSCTASGKRLVFVGMGWFRQAPGKEREFVASISGFRAVTYYADSVKGRFTISRDDARNTVYLQMNSLKPEDTAVYYCNVINDNPMLVEYWGQGTQVTVSS

SEQ ID NO: 11086 - protein, 121 aa, synthetic construct
EVQLVESGGGLVQAGDSLRLSCTASGDRIVFVRMGWFRQAPGKEREFVASISGFRAITYYADSVKGRFTISRDDARNTVYLQMNSLKPEDTAVYYCNVLDASNAINGGEYWGQGTQVTVSS

SEQ ID NO: 11087 - protein, 117 aa, synthetic construct
EVQLVESGGGLVQAGDSLRLSCTASGKVTGWLNMGWFRQAPGKEREFVASISAHRSYTYYADSVKGRFTISRDDARNTVYLQMNSLKPEDTAVYYCNVLKADWAEYWGQGTQVTVSS

SEQ ID NO: 11088 - protein, 120 aa, synthetic construct
EVQLVESGGGLVQAGDSLRLSCTASGIVGIVLEMGWFRQAPGKEREFVASISGAGRYTYYADSVKGRFTISRDDARNTVYLQMNSLKPEDTAVYYCNVSVYTKDRLGEYWGQGTQVTVSS

SEQ ID NO: 11089 - protein, 120 aa, synthetic construct
EVQLVESGGGLVQAGDSLRLSCTASGQVMGLIEMGWFRQAPGKEREFVASISVRAHSTYYADSVKGRFTISRDDARNTVYLQMNSLKPEDTAVYYCNVTGISVNKFSEYWGQGTQVTVSS

SEQ ID NO: 11090 - protein, 120 aa, synthetic construct
EVQLVESGGGLVQAGDSLRLSCTASGVDSVVVEMGWFRQAPGKEREFVASISGHRVYTYYADSVKGRFTISRDDARNTVYLQMNSLKPEDTAVYYCNVVIVVQGTFVEYWGQGTQVTVSS

SEQ ID NO: 11091 - protein, 117 aa, synthetic construct
EVQLVESGGGLVQAGDSLRLSCTASGSEDRVLEMGWFRQAPGKEREFVASISCVMDYTYYADSVKGRFTISRDDARNTVYLQMNSLKPEDTAVYYCNVFTFALVEYWGQGTQVTVSS

SEQ ID NO: 11092 - protein, 120 aa, synthetic construct
EVQLVESGGGLVQAGDSLRLSCTASGVRGPTVEMGWFRQAPGKEREFVASISGSRVYTYYADSVKGRFTISRDDARNTVYLQMNSLKPEDTAVYYCNVTGLDASGKVEYWGQGTQVTVSS

SEQ ID NO: 11093 - protein, 120 aa, synthetic construct
EVQLVESGGGLVQAGDSLRLSCTASGGLTHCIEMGWFRQAPGKEREFVASISGRQSATYYADSVKGRFTISRDDARNTVYLQMNSLKPEDTAVYYCNVTSLQDGFFREYWGQGTQVTVSS

SEQ ID NO: 11094 - protein, 120 aa, synthetic construct
EVQLVESGGGLVQAGDSLRLSCTASGRTAAYMEMGWFRQAPGKEREFVASISGVGKYTYYADSVKGRFTISRDDARNTVYLQMNSLKPEDTAVYYCNVVLAVTNGFAEYWGQGTQVTVSS

SEQ ID NO: 11095 - protein, 125 aa, synthetic construct
EVQLVESGGGLVQAGDSLRLSCTASGVKGQMVDMGWFRQAPGKEREFVASISCTQYYTYYADSVKGRFTISRDDARNTVYLQMNSLKPEDTAVYYCNVTIVELVGSGRMQFREYWGQGTQVTVSS

SEQ ID NO: 11096 - protein, 120 aa, synthetic construct
EVQLVESGGGLVQAGDSLRLSCTASGRCVQIVEMGWFRQAPGKEREFVASISKQGLYTYYADSVKGRFTISRDDARNTVYLQMNSLKPEDTAVYYCNVTVVHASGIEEYWGQGTQVTVSS

SEQ ID NO: 11097 - protein, 119 aa, synthetic construct
EVQLVESGGGLVQAGDSLRLSCTASGRKGHQLEMGWFRQAPGKEREFVASISVRAAVTYYADSVKGRFTISRDDARNTVYLQMNSLKPEDTAVYYCNVTMFDVVFAEYWGQGTQVTVSS

SEQ ID NO: 11098 - protein, 121 aa, synthetic construct
EVQLVESGGGLVQAGDSLRLSCTASGVKGMAMEMGWFRQAPGKEREFVASISCLAHYTYYADSVKGRFTISRDDARNTVYLQMNSLKPEDTAVYYCNVVSVVQKIAFFEYWGQGTQVTVSS

SEQ ID NO: 11099 - protein, 124 aa, synthetic construct
EVQLVESGGGLVQAGDSLRLSCTASGGIDSVVEMGWFRQAPGKEREFVASISGRSLYTYYADSVKGRFTISRDDARNTVYLQMNSLKPEDTAVYYCNVTLLKDVNGRCKVTEYWGQGTQVTVSS

SEQ ID NO: 11100 - protein, 120 aa, synthetic construct
EVQLVESGGGLVQAGDSLRLSCTASGGGMLVIGMGWFRQAPGKEREFVASISNNGYDTYYADSVKGRFTISRDDARNTVYLQMNSLKPEDTAVYYCNVTTVTCCAFLEYWGQGTQVTVSS

SEQ ID NO: 11101 - protein, 120 aa, synthetic construct
EVQLVESGGGLVQAGDSLRLSCTASGCVSTILEMGWFRQAPGKEREFVASISVRVGDTYYADSVKGRFTISRDDARNTVYLQMNSLKPEDTAVYYCNVTVWMSQGFMEYWGQGTQVTVSS

SEQ ID NO: 11102 - protein, 119 aa, synthetic construct
EVQLVESGGGLVQAGDSLRLSCTASGIWGGCIEMGWFRQAPGKEREFVASISGTMVYTYYADSVKGRFTISRDDARNTVYLQMNSLKPEDTAVYYCNVVVVDDKFMEYWGQGTQVTVSS

SEQ ID NO: 11103 - protein, 120 aa, synthetic construct
EVQLVESGGGLVQAGDSLRLSCTASGPTRSAIEMGWFRQAPGKEREFVASISDDTNYTYYADSVKGRFTISRDDARNTVYLQMNSLKPEDTAVYYCNVTVIMSFCFNEYWGQGTQVTVSS

SEQ ID NO: 11104 - protein, 120 aa, synthetic construct
EVQLVESGGGLVQAGDSLRLSCTASGPLAVIMEMGWFRQAPGKEREFVASISGGFEYTYYADSVKGRFTISRDDARNTVYLQMNSLKPEDTAVYYCNVTCKSGYRFWEYWGQGTQVTVSS

SEQ ID NO: 11105 - protein, 120 aa, synthetic construct
EVQLVESGGGLVQAGDSLRLSCTASGVDGCILEMGWFRQAPGKEREFVASISGFGFYTYYADSVKGRFTISRDDARNTVYLQMNSLKPEDTAVYYCNVTLFQVGKFIEYWGQGTQVTVSS

SEQ ID NO: 11106 - protein, 121 aa, synthetic construct
EVQLVESGGGLVQAGDSLRLSCTASGLIEAVLEMGWFRQAPGKEREFVASISGTGRYTYYADSVKGRFTISRDDARNTVYLQMNSLKPEDTAVYYCNVTSVGRAMGIKEYWGQGTQVTVSS

SEQ ID NO: 11107 - protein, 121 aa, synthetic construct
EVQLVESGGGLVQAGDSLRLSCTASGIVGQVVGMDWFRQAPGKEREFVASISMRVWYTYYADSVKGRFTISRDDARNTVYLQMNSLKPEDTAVYYCNVVAWSETIGILEYWGQGTQVTVSS

SEQ ID NO: 11108 - protein, 120 aa, synthetic construct
EVQLVESGGGLVQAGDSLRLSCTASGRHEHILEMGWFRQAPGKEREFVASISARGRLTYYADSVKGRFTISRDDARNTVYLQMNSLKPEDTAVYYCNVTIFVEGTFGEYWGQGTQVTVSS

SEQ ID NO: 11109 - protein, 121 aa, synthetic construct
EVQLVESGGGLVQAGDSLRLSCTASGTIVHIMEMGWFRQAPGKEREFVASISGTGMYTYYADSVKGRFTISRDDARNTVYLQMNSLKPEDTAVYYCNVTSWAREREVREYWGQGTQVTVSS

SEQ ID NO: 11110 - protein, 122 aa, synthetic construct
EVQLVESGGGLVQAGDSLRLSCTASGIASFVVEMGWFRQAPGKEREFVASISGWGDYTYYADSVKGRFTISRDDARNTVYLQMNSLKPEDTAVYYCNVTLYCDEKREIDEYWGQGTQVTVSS

SEQ ID NO: 11111 - protein, 119 aa, synthetic construct
EVQLVESGGGLVQAGDSLRLSCTASGACGTYIEMGWFRQAPGKEREFVASISVSAQYTYYADSVKGRFTISRDDARNTVYLQMNSLKPEDTAVYYCNVCALHLTFVEYWGQGTQVTVSS

SEQ ID NO: 11112 - protein, 121 aa, synthetic construct
EVQLVESGGGLVQAGDSLRLSCTASGGIAYVIEMGWFRQAPGKEREFVASISARGVYTYYADSVKGRFTISRDDARNTVYLQMNSLKPEDTAVYYCNVTAISVNWGIREYWGQGTQVTVSS

SEQ ID NO: 11113 - protein, 120 aa, synthetic construct
EVQLVESGGGLVQAGDSLRLSCTASGRVGCMIEMGWFRQAPGKEREFVASISCRNNGTYYADSVKGRFTISRDDARNTVYLQMNSLKPEDTAVYYCNVTGVGVRMFIEYWGQGTQVTVSS

SEQ ID NO: 11114 - protein, 121 aa, synthetic construct
EVQLVESGGGLVQAGDSLRLSCTASGVVRLIILMGWFRQAPGKEREFVASISGAQMVTYYADSVKGRFTISRDDARNTVYLQMNSLKPEDTAVYYCNVLAKPVVGLWQEYWGQGTQVTVSS

SEQ ID NO: 11115 - protein, 124 aa, synthetic construct
EVQLVESGGGLVQAGDSLRLSCTASGTIQFVVEMGWFRQAPGKEREFVASISAHSMYTYYADSVKGRFTISRDDARNTVYLQMNSLKPEDTAVYYCNVTGVTKGYGAFGIKEYWGQGTQVTVSS

SEQ ID NO: 11116 - protein, 120 aa, synthetic construct
EVQLVESGGGLVQAGDSLRLSCTASGDLAYWMEMGWFRQAPGKEREFVASISRHNCYTYYADSVKGRFTISRDDARNTVYLQMNSLKPEDTAVYYCNVTRVQTNRFIEYWGQGTQVTVSS

SEQ ID NO: 11117 - protein, 120 aa, synthetic construct
EVQLVESGGGLVQAGDSLRLSCTASGVDRQVLEMGWFRQAPGKEREFVASISGRGTYTYYADSVKGRFTISRDDARNTVYLQMNSLKPEDTAVYYCNVGTIGDGGITEYWGQGTQVTVSS

SEQ ID NO: 11118 - protein, 120 aa, synthetic construct
EVQLVESGGGLVQAGDSLRLSCTASGRVTGAMEMGWFRQAPGKEREFVASISCQDIYTYYADSVKGRFTISRDDARNTVYLQMNSLKPEDTAVYYCNVLVFNEGTFSEYWGQGTQVTVSS

SEQ ID NO: 11119 - protein, 120 aa, synthetic construct
EVQLVESGGGLVQAGDSLRLSCTASGTIGRSVEMGWFRQAPGKEREFVASISGQGVGTYYADSVKGRFTISRDDARNTVYLQMNSLKPEDTAVYYCNVTCVVANRFLEYWGQGTQVTVSS

SEQ ID NO: 11120 - protein, 120 aa, synthetic construct
EVQLVESGGGLVQAGDSLRLSCTASGRIMNMVEMGWFRQAPGKEREFVASISGRGNVTYYADSVKGRFTISRDDARNTVYLQMNSLKPEDTAVYYCNVTSVHANRFVEYWGQGTQVTVSS

SEQ ID NO: 11121 - protein, 119 aa, synthetic construct
EVQLVESGGGLVQAGDSLRLSCTASGERSCMLEMGWFRQAPGKEREFVASISNWGHYTYYADSVKGRFTISRDDARNTVYLQMNSLKPEDTAVYYCNVAMYVGGFVEYWGQGTQVTVSS

SEQ ID NO: 11122 - protein, 121 aa, synthetic construct
EVQLVESGGGLVQAGDSLRLSCTASGMGRKVLEMGWFRQAPGKEREFVASISERHGLTYYADSVKGRFTISRDDARNTVYLQMNSLKPEDTAVYYCNVTLWGARMGFFEYWGQGTQVTVSS

SEQ ID NO: 11123 - protein, 120 aa, synthetic construct
EVQLVESGGGLVQAGDSLRLSCTASGVMDSVVEMGWFRQAPGKEREFVASISGRDTATYYADSVKGRFTISRDDARNTVYLQMNSLKPEDTAVYYCNVTRFDRSVFREYWGQGTQVTVSS

SEQ ID NO: 11124 - protein, 120 aa, synthetic construct
EVQLVESGGGLVQAGDSLRLSCTASGALAGMLEMGWFRQAPGKEREFVASISKSGTYTYYADSVKGRFTISRDDARNTVYLQMNSLKPEDTAVYYCNVVMRVNSGFLEYWGQGTQVTVSS

SEQ ID NO: 11125 - protein, 120 aa, synthetic construct
EVQLVESGGGLVQAGDSLRLSCTASGMRDFIIEMGWFRQAPGKEREFVASISAQVDYTYYADSVKGRFTISRDDARNTVYLQMNSLKPEDTAVYYCNVSTFGHYMLKEYWGQGTQVTVSS

SEQ ID NO: 11126 - protein, 119 aa, synthetic construct
EVQLVESGGGLVQAGDSLRLSCTASGALNGVMEMGWFRQAPGKEREFVASISGGGEYTYYADSVKGRFTISRDDARNTVYLQMNSLKPEDTAVYYCNVVRFLDKLVEYWGQGTQVTVSS

SEQ ID NO: 11127 - protein, 119 aa, synthetic construct
EVQLVESGGGLVQAGDSLRLSCTASGMRSGLLEMGWFRQAPGKEREFVASISVCGEGTYYADSVKGRFTISRDDARNTVYLQMNSLKPEDTAVYYCNVTVFIGAFREYWGQGTQVTVSS

SEQ ID NO: 11128 - protein, 122 aa, synthetic construct
EVQLVESGGGLVQAGDSLRLSCTASGIRGVMLEMGWFRQAPGKEREFVASISDREHHTYYADSVKGRFTISRDDARNTVYLQMNSLKPEDTAVYYCNVVGVVFVTGRFEEYWGQGTQVTVSS

SEQ ID NO: 11129 - protein, 122 aa, synthetic construct
EVQLVESGGGLVQAGDSLRLSCTASGQVGGILEMGWFRQAPGKEREFVASISGLGTYTYYADSVKGRFTISRDDARNTVYLQMNSLKPEDTAVYYCNVIWVAKRAGTFREYWGQGTQVTVSS

SEQ ID NO: 11130 - protein, 119 aa, synthetic construct
EVQLVESGGGLVQAGDSLRLSCTASGSPGVMVEMGWFRQAPGKEREFVASISTQGEYTYYADSVKGRFTISRDDARNTVYLQMNSLKPEDTAVYYCNVVWIMDVFREYWGQGTQVTVSS

SEQ ID NO: 11131 - protein, 120 aa, synthetic construct
EVQLVESGGGLVQAGDSLRLSCTASGTVLRVIEMGWFRQAPGKEREFVASISSNMDFTYYADSVKGRFTISRDDARNTVYLQMNSLKPEDTAVYYCNVTTLGTGTFCEYWGQGTQVTVSS

SEQ ID NO: 11132 - protein, 121 aa, synthetic construct
EVQLVESGGGLVQAGDSLRLSCTASGMVKDVMEMGWFRQAPGKEREFVASISRANAYTYYADSVKGRFTISRDDARNTVYLQMNSLKPEDTAVYYCNVMGFRIEVGLREYWGQGTQVTVSS

SEQ ID NO: 11133 - protein, 120 aa, synthetic construct
EVQLVESGGGLVQAGDSLRLSCTTSGRYVSILEMGWFRQAPGKEREFVASISDRGSYTYYADSVKGRFTISRDDARNTVYLQMNSLKPEDTAVYYCNVTSLKGGRVVEYWGQGTQVTVSS

SEQ ID NO: 11134 - protein, 121 aa, synthetic construct
EVQLVESGGGLVQAGDSLRLSCTASGHEHLMVDMGWFRQAPGKEREFVASISSEPHYTYYADSVKGRFTISRDDARNTVYLQMNSLKPEDTAVYYCNVTLYIRGMGFNEYWGQGTQVTVSS

SEQ ID NO: 11135 - protein, 120 aa, synthetic construct
EVQLVESGGGLVQAGDSLRLSCTASGMDKHVLEMGWFRQAPGKEREFVASISGPGNYTYYADSVKGRFTISRDDARNTVYLQMNSLKPEDTAVYYCNVVTMIAVGFMEYWGQGTQVTVSS

SEQ ID NO: 11136 - protein, 122 aa, synthetic construct
EVQLVESGGGLVQAGDSLRLSCTASGDLAQVLEMGWFRQSPGKEREFVASISGSLVYTYYADSVKGRFTISRDDARNTVYLQMNSLKPEDTAVYYCNVVTVCPVHWTFGEYWGQGTQVTVSS

SEQ ID NO: 11137 - protein, 122 aa, synthetic construct
EVQLVESGGGLVQAGDSLRLSCTASGRGGTWFEMGWFRQAPGKEREFVASISVQGDYTYYADSVKGRFTISRDDARNTVYLQMNSLKPEDTAVYYCNVTMKLSQHPYFVEYWGQGTQVTVSS

SEQ ID NO: 11138 - protein, 117 aa, synthetic construct
EVQLVESGGGLVQAGDSLRLSCTASGQGGHLVEMGWFRQAPGKEREFVASISGHSEYTYYADSVKGRFTISRDDARNTVYLQMNSLKPEDTAVYYCNVTTVGFREYWGQGTQVTVSS

SEQ ID NO: 11139 - protein, 120 aa, synthetic construct
EVQLVESGGGLVQAGDSLRLSCTASGHGAVLVEMGWFRQAPGKEREFVASISGGNEYTYYADSVKGRFTISRDDARNTVYLQMNSLKPEDTAVYYCNVAVWHQFCFQEYWGQGTQVTVSS

SEQ ID NO: 11140 - protein, 121 aa, synthetic construct
EVQLVESGGGLVQAGDSLRLSCTASGRWKNELEMGWFRQAPGKEREFVASISMLGNLTYYADSVKGRFTISRDDARNTVYLQMNSLKPEDTAVYYCNVTVYAVGVGFKEYWGQGTQVTVSS

SEQ ID NO: 11141 - protein, 119 aa, synthetic construct
EVQLVESGGGLVQAGDSLRLSCTASGRRTVFLRMGWFRQAPGKEREFVASISGFREQTYYADSVKGRFTISRDDARNTVYLQMNSLKPEDTAVYYCNVIIRRHVNVEYWGQGTQVTVSS

SEQ ID NO: 11142 - protein, 121 aa, synthetic construct
EVQLVESGGGLVQAGDSLRLSCTASGRKCKMIEMGWFRQAPGKEREFVASISVHWGATYYADSVKGRFTISRDDARNTVYLQMNSLKPEDTAVYYCNVTTFSVSLGFPEYWGQGTQVTVSS

SEQ ID NO: 11143 - protein, 120 aa, synthetic construct
EVQLVESGGGLVQAGDSLRLSCTASGACRMQLEMGWFRQAPGKEREFVASISVRDALTYYADSVKGRFTISRDDARNTVYLQMNSLKPEDTAVYYCNVTSFTLAGKIEYWGQGTQVTVSS

SEQ ID NO: 11144 - protein, 121 aa, synthetic construct
EVQLVESGGGLVQAGDSLRLSCTASGGAPQLIEMGWFRQAPGKEREFVASISTRTFTTYYADSVKGRFTISRDDARNTVYLQMNSLKPEDTAVYYCNVTSWDRVAYFREYWGQGTQVTVSS

SEQ ID NO: 11145 - protein, 120 aa, synthetic construct
EVQLVESGGGLVQAGDSLRLSCTASGYRIVFQLMGWFRQAPGKEREFVASISGFHQLTYYADSVKGRFTISRDDARNTVYLQMNSLKPEDTAVYYCNVLGDLILTGREYWGQGTQVTVSS

SEQ ID NO: 11146 - protein, 119 aa, synthetic construct
EVQLVESGGGLVQAGDSLRLSCTASGEERLSGEMGWFRQAPGKEREFVASISKVFQKTYYADSVKGRFTISRDDARNTVYLQMNSLKPEDTAVYYCNVVWVMVFHAEYWGQGTQVTVSS

SEQ ID NO: 11147 - protein, 120 aa, synthetic construct
EVQLVESGGGLVQAGDSLRLSCTASGNADRCLEMGWFRQAPGKEREFVASISSRDGNTYYADSVKGRFTISRDDARNTVYLQMNSLKPEDTAVYYCNVTYVRVGGFAEYWGQGTQVTVSS

SEQ ID NO: 11148 - protein, 120 aa, synthetic construct
EVQLVESGGGLVQAGDSLRLSCTASGGTNALIEMGWFRQAPGKEREFVASISMVGVYTYYADSVKGRFTISRDDARNTVYLQMNSLKPEDTAVYYCNVVLFGSGEFREYWGQGTQVTVSS

SEQ ID NO: 11149 - protein, 120 aa, synthetic construct
EVQLVESGGGLVQAGDSLRLSCTASGHDRFVMEMGWFRQAPGKEREFVASISGIGIYTYYADSVKGRFTISRDDARNTVYLQMNSLKPEDTAVYYCNVSCFDSGRVAEYWGQGTQVTVSS

SEQ ID NO: 11150 - protein, 120 aa, synthetic construct
EVQLVESGGGLVQAGDSLRLSCTASGIVWLVMEMGWFRQAPGKEREFVASISGSARATYYADSVKGRFTISRDDARNTVYLQMNSLKPEDTAVYYCNVTLWDMIRFSEYWGQGTQVTVSS

SEQ ID NO: 11151 - protein, 122 aa, synthetic construct
EVQLVESGGGLVQAGDSLRLSCTASGCCDNGMEMGWFRQAPGKEREFVASISCNSDYTYYADSVKGRFTISRDDARNTVYLQMNSLKPEDTAVYYCNVTVILYAAVMFAEYWGQGTQVTVSS

SEQ ID NO: 11152 - protein, 120 aa, synthetic construct
EVQLVESGGGLVQAGDSLRLSCTASGVRHRVIEMGWFRQAPGKEREFVASISGHSRYTYYADSVKGRFTISRDDARNTVYLQMNSLKPEDTAVYYCNVVVHAFSMFTEYWGQGTQVTVSS

SEQ ID NO: 11153 - protein, 120 aa, synthetic construct
EVQLVESGGGLVQAGDSLRLSCTASGGIHSWLEMGWFRQAPGKEREFVASISGRRGETYYADSVKGRFAISRDDARNTVYLQMNSLKPEDTAVYYCNQTRLDSMRFIEYWGQGTQVTVSS

SEQ ID NO: 11154 - protein, 121 aa, synthetic construct
EVQLVESGGGLVQAGDSLRLSCTASGIVGVMLEMGWFRQAPGKEREFVASISATENYTYYADSVKGRFTISRDDARNTVYLQMNSLKPEDTAVYYCNVTSMIWNKGVMEYWGQGTQVTVSS

SEQ ID NO: 11155 - protein, 120 aa, synthetic construct
EVQLVESGGGLVQAGDSLRLSCTASGKGLMTIEMGWFRQAPGKEREFVASISSREQRTYYADSVKGRFTISRDDARNTVYLQMNSLKPEDTAVYYCNVTIFDVGHFDEYWGQGTQVTVSS

SEQ ID NO: 11156 - protein, 120 aa, synthetic construct
EVQLVESGGGLVQAGDSLRLSCTASGINGKVLEMGWFRQAPGKEREFVASISFVRMYTYYADSVKGRFTISRDDARNTVYLQMNSLKPEDTAVYYCNVCVLVPTAFREYWGQGTQVTVSS

SEQ ID NO: 11157 - protein, 122 aa, synthetic construct
EVQLVESGGGLVQAGDSLRLSCTASGVSDRTVEMGWFRQAPGKEREFVASISGEDDYTYYADSVKGRFTISRDDARNTVYLQMNSLKPEDTAVYYCNVTTVNGFIGRFVEYWGQGTQVTVSS

SEQ ID NO: 11158 - protein, 121 aa, synthetic construct
EVQLVESGGGLVQAGDSLRLSCTASGPTFYVVEMGWFRQAPGKEREFVASISGHTRSTYYTDSVKGRFTISRDDARNTVYLQMNSLKPEDTAVYYCNVTGLRETWQFDEYWGQGTQVTVSS

SEQ ID NO: 11159 - protein, 119 aa, synthetic construct
EVQLVESGGGLVQAGDSLRLSCTASGPLKRYVYMDWFRQAPGKEREFVASISGLSLYTYYADSVKGRFTISRDDARNTVYLQMNSLKPEDTAVYYCNVRMATNFADEYWGQGTQVTVSS

SEQ ID NO: 11160 - protein, 119 aa, synthetic construct
EVQLVESGGGLVQAGDSLRLSCTASGSTGTGLEMGWFRQAPGKEREFVASISLAVEYTYYADSVKGRFTISRDDARNTVYLQMNSLKPEDTAVYYCNVTVYKGGFREYWGQGTQVTVSS

SEQ ID NO: 11161 - protein, 121 aa, synthetic construct
EVQLVESGGGLVQAGDSLRLSCTASGDCMRVMEMGWFRQAPGKEREFVASISNDRTYTYYADSVKGRFTISRDDARNTVYLQMNSLKPEDTAVYYCNVTCLNIIGRVREYWGQGTQVTVSS

SEQ ID NO: 11162 - protein, 124 aa, synthetic construct
EVQLVESGGGLVQAGDSLRLSCTASGMERRVLEMGWFRQAPGKEREFVASISGDRSYTYYADSVKGRFTISRDDARNTVYLQMNSLKPEDTAVYYCNVTGVGLVGSRVIVMEYWGQGTQVTVSS

SEQ ID NO: 11163 - protein, 119 aa, synthetic construct
EVQLVESGGGLVQAGDSLRLSCTASGRRLMLVEMGWFRQAPGKEREFVASISMAREYTYYADSVKGRFTISRDDARNTVYLQMNSLKPEDTAVYYCNVTGLSEGFREYWGQGTQVTVSS

SEQ ID NO: 11164 - protein, 119 aa, synthetic construct
EVQLVESGGGLVQAGDSLRLSCTASGMVGQILEMGWFRQAPGKEREFVASISVSREGTYYADSVKGRFTISRDDARNTVYLQMNSLKPEDTAVYYCNVTTIRIRFLEYWGQGTQVTVSS

SEQ ID NO: 11165 - protein, 119 aa, synthetic construct
EVQLVESGGGLVQAGDSLRLSCTASGTKHLILEMGWFRQAPGKEREFVASISMRGVETYYADSVKGRFTISRDDARNTVYLQMNSLKPEDTAVYYCNVTTYFQMFHEYWGQGTQVTVSS

SEQ ID NO: 11166 - protein, 121 aa, synthetic construct
EVQLVESGGGLVQAGDSLRLSCTASGYRIVFQTMGWFRQAPGKEREFVASISGFRVKTYYADSVKGRFTISRDDARNTVYLQMNSLKPEDTAVYYCNVLEVMPVGRRDEYWGQGTQVTVSS

SEQ ID NO: 11167 - protein, 122 aa, synthetic construct
EVQLVESGGGLVQAGDSLRLSCTASGVLGRIVEMGWFRQAPGKEREFVASISGSHYFTYYADSVKGRFTISRDDARNTVYLQMNSLKPEDTAVYYCNVTIVGSNRPGFEEYWGQGTQVTVSS

SEQ ID NO: 11168 - protein, 121 aa, synthetic construct
EVQLVESGGGLVQAGDSLRLSCTASGMMGEILAMDWFRQAPGKEREFVASISAKVHMTYYADSVKGRFTISRDDARNTVYLQMNSLKPEDTAVYYCNVTVIVRMAGFVEYWGQGTQVTVSS

SEQ ID NO: 11169 - protein, 120 aa, synthetic construct
EVQLVESGGGLVQAGDSLRLSCTASGGFNNPIEMGWFRQAPGKEREFVASISGHGGYTYYADSVKGRFTISRDDARNTVYLQMNSLKPEDTAVYYCNVVSLGKQGFLEYWGQGTQVTVSS

SEQ ID NO: 11170 - protein, 120 aa, synthetic construct
EVQLVESGGGLVQAGDSLRLSCTASGEVGTLIEMGWFRQAPGKEREFVASISGDLQYTYYADSVKGRFTISRDDARNTVYLQMNSLKPEDTAVYYCNVTVFWMIRLMEYWGQGTQVTVSS

SEQ ID NO: 11171 - protein, 124 aa, synthetic construct
EVQLVESGGGLVQAGDSLRLSCTASGSVTAVIEMGWFRQAPGKEREFVASISGSNEYTYYADSVKGRFTISRDDARNTVYLQMNSLKPEDTAVYYCNVVLWKVASMDKGFKEYWGQGTQVTVSS

SEQ ID NO: 11172 - protein, 122 aa, synthetic construct
EVQLVESGGGLVQAGDSLRLSCTASGPSGVVIEMGWFRQAPGKEREFVASISGACLYTYYADSVKGRFTISRDDARNTVYLQMNSLKPEDTAVYYCNVSMIAVADKRFREYWGQGTQVTVSS

SEQ ID NO: 11173 - protein, 120 aa, synthetic construct
EVQLVESGGGLVQAGDSLRLSCTASGMALVFRRMGWFRQAPGKEREFVASISGFRERTYYADSVKGRFTISRDDARNTVYLQMNSLKPEDTAVYYCNVGAASTDVWQEYWGQGTQVTVSS

SEQ ID NO: 11174 - protein, 119 aa, synthetic construct
EVQLVESGGGLVQAGDSLRLSCTASGRGDRILEMGWFRQAPGKEREFVASISGFGIYTYYADSVKGRFTISRDDARNTVYLQMNSLKPEDTAVYYCNVIAFNYVFYEYWGQGTQVTVSS

SEQ ID NO: 11175 - protein, 120 aa, synthetic construct
EVQLVESGGGLVQAGDSLRLSCTASGKLNMALEMGWFRQAPGKEREFVASISYDGGFTYYADSVKGRFTISRDDARNTVYLQMNSLKPEDTAVYYCNVTVFVGVRFVEYWGQGTQVTVSS

SEQ ID NO: 11176 - protein, 120 aa, synthetic construct
EVQLVESGGGLVQAGDSLRLSCTASGRDGRCIEMGWFRQAPGKEREFVASISDRLHVTYYADSVKGRFTISRDDARNTVYLQMNSLKPEDTAVYYCNVTIISGFGILEYWGQGTQVTVSS

SEQ ID NO: 11177 - protein, 124 aa, synthetic construct
EVQLVESGGGLVQAGDSLRLSCTASGNKRDIMEMGWFRQAPGKEREFVASISGWKSYTYYADSVKGRFTISRDDARNTVYLQMNSLKPEDTAVYYCNVSNLILRNGLLMVVEYWGQGTQVTVSS

SEQ ID NO: 11178 - protein, 119 aa, synthetic construct
EVQLVESGGGLVQAGDSLRLSCTASGNMVEMGWFRQAPGKEREFVASISGIGFYTYYADSVKGRFTISRDDARNTVYLQMNSLKPEDTAVYYCNVTLVNSKFLTFKEYWGQGTQVTVSS

SEQ ID NO: 11179 - protein, 120 aa, synthetic construct
EVQLVESGGGLVQAGDSLRLSCTASGMNQAPMEMGWFRQAPGKEREFVASISIRRDGTYYADSVKGRFTISRDDARNTVYLQMNSLKPEDTAVYYCNVTTWDQRKFVEYWGQGTQVTVSS

SEQ ID NO: 11180 - protein, 119 aa, synthetic construct
EVQLVESGGGLVQAGDSLRLSCTASGTIGLVIEMGWFRQAPGKEREFVASISDGGLYTYYADSVKGRFTISRDDARNTVYLQMNSLKPEDTAVYYCNVTSLKCGKREYWGQGTQVTVSS

SEQ ID NO: 11181 - protein, 121 aa, synthetic construct
EVQLVESGGGLVQAGDSLRLSCTASGTNGMVVEMGWFRQAPGKEREFVASISGMGRYTYYADSVKGRFTISRDDARNTVYLQMNSLKPEDTAVYYCNVSMLTTFALFTEYWGQGTQVTVSS

SEQ ID NO: 11182 - protein, 120 aa, synthetic construct
EVQLVESGGGLVQAGDSLRLSCTASGKKAGMIEMGWFRQAPGKEREFVASISVFSDYTYYADSVKGRFTISRDDARNTVYLQMNSLKPEDTAVYYCNVLTVAGFRIVEYWGQGTQVTVSS

SEQ ID NO: 11183 - protein, 117 aa, synthetic construct
EVQLVESGGGLVQAGDSLRLSCTASGHITQYLEMGWFRQAPGKEREFVASISGGQDYTYYADSVKGRFTIPRDDARNTVYLQMNSLKPEDTAVYYCNVTTVTFAEYWGQGTQVTVSS

SEQ ID NO: 11184 - protein, 121 aa, synthetic construct
EVQLVESGGGLVQAGDSLRLSCTASGRLVGVVEMGWFRQAPGKEREFVASISGGCGYTYYADSVKGRFTISRDDARNTVYLQMNSLKPEDTAVYYCNVTILVDVMGFKEYWGQGTQVTVSS

SEQ ID NO: 11185 - protein, 122 aa, synthetic construct
EVQLVESGGGLVQAGDSLRLSCTASGIRFVFRTMGWFRQAPGKEREFVASISGDGDYTYYADSVKGRFTISRDDARNTVYLQMNSLKPEDTAVYYCNVTLLSFRRRRIREYWGQGTQVTVSS

SEQ ID NO: 11186 - protein, 121 aa, synthetic construct
EVQLVESGGGLVQAGDSLRLSCTASGPVVTVVEMGWFRQAPGKEREFVASISGMFVDTYYADSVKGRFTISRDDARNTVYLQMNSLKPEDTAVYYCNVTSIVHGKGFLEYWGQGTQVTVSS

SEQ ID NO: 11187 - protein, 120 aa, synthetic construct
EVQLVESGGGLVQAGDSLRLSCTASGCHEMVIEMGWFRQAPGKEREFVASISGESQYTYYADSVKGRFTISRDDARNTVYLQMNSLKPEDTAVYYCNVTSLVLCRVVEYWGQGTQVTVSS

SEQ ID NO: 11188 - protein, 119 aa, synthetic construct
EVQLVESGGGLVQAGDSLRLSCTASGMRGWALELGWFRQAPGKEREFVASISNDGVYTYYADSVKGRFTISRDDARNTVYLQMNSLKPEDTAVYYCNVTVIDGRFREYWGQGTQVTVSS

SEQ ID NO: 11189 - protein, 118 aa, synthetic construct
EVQLVESGGGLVQAGDSLRLSCTASGIRIGFAVMGWFRQAPGKEREFVAEGMGCTTYYADSVKGRFTISRDDARNTVYLQMNSLKPEDTAVYYCNVLSGAQVQRAEYWGQGTQVTVSS

SEQ ID NO: 11190 - protein, 120 aa, synthetic construct
EVQLVESGGGLVQAGDSLRLSCTASGNMRFALEMGWFRQAPGKEREFVASISGVGSYTYYADSVKGRFTISRDDARNTVYLQMNSLKPEDTAVYYCNVVEFNFGMYREYWGQGTQVTVSS

SEQ ID NO: 11191 - protein, 120 aa, synthetic construct
EVQLVESGGGLVQAGDSLRLSCTASGETNGIVEMGWFRQAPGKEREFVASISGRGTYTYYADSVKGRFTISRDDARNTVYLQMNSLKPEDTAVFTATVTAIGRRRVGEYWGQGTQVTVSS

SEQ ID NO: 11192 - protein, 119 aa, synthetic construct
EVQLVESGGGLVQAGDSLRLSCTASGIGNVVMEMGWFRQAPGKEREFVASISGSGKYTYYADSVKGRFTISRDDARNTVYLQMNSLKPEDTAVYYCNVSVWDRMVNEYWGQGTQVTVSS

SEQ ID NO: 11193 - protein, 125 aa, synthetic construct
EVQLVESGGGLVQAGDSLRLSCTASGSAAHTVEMGWFRQAPGKEREFVASISGNSGYTYYADSVKGRFTISRDDARNTVYLQMNSLKPEDTAVYYCNVVAYILVANLVLNFVEYWGQGTQVTVSS

SEQ ID NO: 11194 - protein, 119 aa, synthetic construct
EVQLVESGGGLVQAGDSLRLSCTASGVLRSVLEMGWFRQAPGKEREFVASISGNGSYTYYADSVKGRFTISRDDARNTVYLQMNSLKPEDTAVYYCNVCCIKHGVVEYWGQGTQVTVSS

SEQ ID NO: 11195 - protein, 119 aa, synthetic construct
EVQLVESGGGLVQAGDSLRLSCTASGGTQDTIEMGWFRQAPGKEREFVASISGSGLRTYYADSVKGRFTISRDDARNTVYLQMNSLKPEDTAVYYCRFTQIMVHVVEYWGQGTQVTVSS

SEQ ID NO: 11196 - protein, 121 aa, synthetic construct
EVQLVESGGGLVQAGDSLRLSCTASGLVNTYIEMGWFRQAPGKEREFVASISIKDGATYYADSVKGRFTISRDDARNTVYLQMNSLKPEDTAVYYCNVTVFWAQIGFKEYWGQGTQVTVSS

SEQ ID NO: 11197 - protein, 123 aa, synthetic construct
EVQLVESGGGLVQAGDSLRLSCTASGRRVGMIEMGWFRQAPGKEREFVASISCMTYGTYYADSVKGRFTISRDDARNTVYLQMNSLKPEDTAVYYCNVTGFVNGAMPHFQEYWGQGTQVTVSS

SEQ ID NO: 11198 - protein, 120 aa, synthetic construct
EVQLVESGGGLVQAGDSLRLSCTASGTAALVMEMGWFRQAPGKEREFVASISGVGPYTYYADSVKGRFTISRDDARNTVYLQMNSLKPEDTAVYYCNVTIWTRESFSEYWGQGTQVTVSS

SEQ ID NO: 11199 - protein, 119 aa, synthetic construct
EVQLVESGGGLVQAGDSLRLSCTASGVMAAAMEMGWFRQAPGKEREFVASISVLVGVTYYADSVKGRFTISRDDARNTVYLQMNSLKPEDTAVYYCNVTPREFWNGEYWGQGTQVTVSS

SEQ ID NO: 11200 - protein, 120 aa, synthetic construct
EVQLVESGGGLVQAGDSLRLSCTASGMVNTAFEMGWFRQAPGKEREFVASISWIGVYTYYADSVKGRFTISRDDARNTVYLQMNSLKPEDTAVYYCNVSALMHHRITEYWGQGTQVTVSS

SEQ ID NO: 11201 - protein, 124 aa, synthetic construct
EVQLVESGGGLVQAGDSLRLSCTASGDGSGIIEMGWFRQAPGKEREFVASISKGGGYTYYADSVKGRFTISRDDARNTVYLQMNSLKPEDTAVYYCNVTHMMFVLGTISANEYWGQGTQVTVSS

SEQ ID NO: 11202 - protein, 121 aa, synthetic construct
EVQLVESGGGLVQAGDSLRLSCTASGSEGLLVEMGWFRQAPGKEREFVASISGDANYTYYADSVKGRFTISRDDARNTVYLQMNSLKPEDTAVYYCNVVLLVMSKGFKEYWGQGTQVTVSS

SEQ ID NO: 11203 - protein, 120 aa, synthetic construct
EVQLVESGGGLVQAGDSLRLSCTASGCGPNSLEMGWFRQAPGKEREFVASISTVWEATYYADSVKGRFTISRDDARNTVYLQMNSLKPEDTAVYYCNVTSFNRVAFIEYWGQGTQVTVSS

SEQ ID NO: 11204 - protein, 125 aa, synthetic construct
EVQLVESGGGLVQAGDSLRLSCTASGVDKGFIEMGWFRQAPGKEREFVASISVAFDYTYYADSVKGRFTISRDDARNTVYLQMNSLKPEDTAVYYCNVTCVVSNEVSGVRFREYWGQGTQVTVSS

SEQ ID NO: 11205 - protein, 119 aa, synthetic construct
EVQLVESGGGLVQAGDSLRLSCTASGKNCVMMEMGWFRQAPGKEREFVASISCYNDYTYYADSVKGRFTISRDDARNTVYLQMNSLKPEDTAVYYCNVCCWVSTFHEYWGQGTQVTVSS

SEQ ID NO: 11206 - protein, 124 aa, synthetic construct
EVQLVESGGGLVQAGDSLRLSCTASGMPGISLSMGWFRQAPGKEREFVASISGGDALTYYADSVKGRFTISRDDARNTVYLQMNSLKPEDTAVYYCNVEVIRVDMRRFRFEEYWGQGTQVTVSS

SEQ ID NO: 11207 - protein, 115 aa, synthetic construct
EVQLVESGGGLVQAGDSLRLSCTASGFEMGWFRQAPGKEREFVASISNSGWYTYYADSVKGRFTISRDDARNTVYLQMNSLKPEDTAVYYCNVALFTGSRLMEYWGQGTQVTVSS

SEQ ID NO: 11208 - protein, 120 aa, synthetic construct
EVQLVESGGGLVQAGDSLRLSCTASGTIVGAMEMGWFRQAPGKEREFVASISFHLGSTYYADSVKGRFTISRDDARNTVYLQMNSLKPEDTAVYYCNVTAFETYGFHEYWGQGTQVTVSS

SEQ ID NO: 11209 - protein, 120 aa, synthetic construct
EVQLVESGGGLVQAGDSLRLSCTASGDLWHQTVMGWFRQAPGKEREFVASISTDSERTYYADSVKGRFTISRDDARNTVYLQMNSLKPEDTAVYYCNVTVEYLLWNAEYWGQGTQVTVSS

SEQ ID NO: 11210 - protein, 117 aa, synthetic construct
EVQLVESGGGLVQAGDSLRLSCTASGRRLVFVTMGWFRQAPGKEREFVASISGFGLMTYYADSVKGRFTISRDDARNTVYLQMNSLKPEDTAVYYCNVESPEPNEYWGQGTQVTVSS

SEQ ID NO: 11211 - protein, 120 aa, synthetic construct
EVQLVESGGGLVQAGDSLRLSCTASGIVWAVLEMGWFRQAPGKEREFVASISGNGAYTYYADSVKGRFTISRDDARNTVYLQMNSLKPEDTAVYYCNVSVLGASRLTEYWGQGTQVTVSS

SEQ ID NO: 11212 - protein, 120 aa, synthetic construct
EVQLVESGGGLVQAGDSLRLSCTASGIVRNCFEMGWFRQAPGKEREFVASISGVGEYTYYADSVKGRFTISRDDARNTVYLQMNSLKPEDTAVYYCNVWIVGDGRFQEYWGQGTQVTVSS

SEQ ID NO: 11213 - protein, 119 aa, synthetic construct
EVQLVESGGGLVQAGDSLRLSCTASGTPASSIEMGWFRQAPGKEREFVASISTSHGVTYYADSVKGRFTISRDDARNTVYLQMNSLKPEDTAVYYCNVTILRHRFLEYWGQGTQVTVSS

SEQ ID NO: 11214 - protein, 120 aa, synthetic construct
EVQLVESGGGLVQAGDSLRLSCTASGLPVWVVEMGWFRQAPGKEREFVASISGDCSSTYYADSVKGRFTISRDDARNTVYLQMNSLKPEDTAVYYCNVTAVVEHSFREYWGQGTQVTVSS

SEQ ID NO: 11215 - protein, 120 aa, synthetic construct
EVQLVESGGGLVQAGDSLRLSCTASGIGERVLEMGWFRQAPGKEREFVASISGTWGATYYADSVKGRFTISRDDARNTVYLQMNSLKPEDTAVYYCNVTTFREDWFHEYWGQGTQVTVSS

SEQ ID NO: 11216 - protein, 119 aa, synthetic construct
EVQLVESGGGLVQAGDSLRLSCTASGDSEGVFWMGWFRQAPGKEREFVASISGLSASTYYADSVKGRFTISRDDARNTVYLQMNSLKPEDTAVYYCNVLMMYVWDCEYWGQGTQVTVSS

SEQ ID NO: 11217 - protein, 120 aa, synthetic construct
EVQLVESGGGLVQAGDSLRLSCTASGVLKGTLEMGWFRQAPGKEREFVASISGTMDYTYYADSVKGRFTISRDDARNTVYLQMNSLKPEDTAVYYCNVTIMNGDRFVEYWGQGTQVTVSS

SEQ ID NO: 11218 - protein, 120 aa, synthetic construct
EVQLVESGGGLVQAGDSLRLSCTASGIVARIIEMGWFRQAPGKEREFVASISGFGIYTYYADSVKGRFTISRDDARNTVYLQMNSLKPEDTAVYYCNVSAWTDLNFLEYWGQGTQVTVSS

SEQ ID NO: 11219 - protein, 121 aa, synthetic construct
EVQLVESGGGLVQAGDSLRLSCTASGNVALGMEMGWFRQAPGKEREFVASISMVAVYTYYADSVKGRFTISRDDARNTVYLQMNSLKPEDTAVYYCNVTCLSKEFGIEEYWGQGTQVTVSS

SEQ ID NO: 11220 - protein, 120 aa, synthetic construct
EVQLVESGGGLVQAGDSLRLSCTASGLLGRGIEMGWFRQAPGKEREFVASISCAGDYTYYADSVKGRFTISRDDARNTVYLQMNSLKPEDTAVYYCNVTMVAENRLLEYWGQGTQVTVSS

SEQ ID NO: 11221 - protein, 120 aa, synthetic construct
EVQLVESGGGLVQAGDSLRLSCTASGLSHETIEMGWFRQAPGKEREFVASISRAGHFTYYADSVKGRFTISRDDARNTVYLQMNSLKPEDTAVYYCNVTCFAIRKFLEYWGQGTQVTVSS

SEQ ID NO: 11222 - protein, 120 aa, synthetic construct
EVQLVESGGGLVQAGDSLRLSCTASGDVRRLLEMGWFRQAPGKEREFVASISWRANYTYYADSVKGRFTISRDDARNTVYLQMNSLKPEDTAVYYCNVVNVDRLGLTEYWGQGTQVTVSS

SEQ ID NO: 11223 - protein, 121 aa, synthetic construct
EVQLVESGGGLVQAGDSLRLSCTASGEGNSVLEMGWFRQAPGKEREFVASISGNTVLTYYADSVKGRFTISRDDARNTVYLQMNSLKPEDTAVYYCNVTHLTQHLRFVEYWGQGTQVTVSS

SEQ ID NO: 11224 - protein, 121 aa, synthetic construct
EVQLVESGGGLVQAGDSLRLSCTASGMSDGILEMGWFRQAPGKEREFVASISGVSFYTYYADSVKGRFTISRDDARNTVYLQMNSLKPEDTAVYYCNVSQFAAWSLLQEYWGQGTQVTVSS

SEQ ID NO: 11225 - protein, 121 aa, synthetic construct
EVQLVESGGGLVQAGDSLRLSCTASGKLVGMLEMGWFRQAPGKEREFVASISTRTLYTYYADSVKGRFTISRDDARNTVYLQMNSLKPEDTAVYYCNVAGIVGGLKMIEYWGQGTQVTVSS

SEQ ID NO: 11226 - protein, 120 aa, synthetic construct
EVQLVESGGGLVQAGDSLRLSCTASGSGRNCIEMGWFRQAPGKEREFVASISGRGFNTYYADSVKGRFTISRDDARNTVYLQMNSLKPEDTAVYYCNVTMYGVGSFVEYWGQGTQVTVSS

SEQ ID NO: 11227 - protein, 120 aa, synthetic construct
EVQLVESGGGLVQAGDSLRLSCTASGGAGTVLEMGWFRQAPGKEREFVASISWAAKMTYYADSVKGRFTISRDDARNTVYLQMNSLKPEDTAVYYCNVTAIGVRSFDEYWGQGTQVTVSS

SEQ ID NO: 11228 - protein, 120 aa, synthetic construct
EVQLVESGGGLVQAGDSLRLSCTASGGKGSMIMMDWFRQAPGKEREFVASISVNSDYTYYADSVKGRFTISRDDARNTVYLQMNSLKPEDTAVYYCNVVVVDGRFLVEYWGQGTQVTVSS

SEQ ID NO: 11229 - protein, 121 aa, synthetic construct
EVQLVESGGGLVQAGDSLRLSCTASGFKGFVIEMGWFRQAPGKEREFVASISNNGAYTYYADSVKGRFTISRDDARNTVYLQMNSLKPEDTAVYYCNVTWLSPGMVFLEYWGQGTQVTVSS

SEQ ID NO: 11230 - protein, 120 aa, synthetic construct
EVQLVESGGGLVQAGDSLRLSCTASGATFLPLEMGWFRQAPGKEREFVASISGFHTYTYYADSVKGRFTISRDDARNTVYLQMNSLKPEDTAVYYCNVTALMARLIVEYWGQGTQVTVSS

SEQ ID NO: 11231 - protein, 120 aa, synthetic construct
EVQLVESGGGLVQAGDSLRLSCTASGVCGIKIEMGWFRQAPGKEREFVASISGRNVYTYYADSVKGRFTISRDDARNTVYLQMNSLKPEDTAVYYCNVTTWLDCSVREYWGQGTQVTVSS

SEQ ID NO: 11232 - protein, 121 aa, synthetic construct
EVQLVESGGGLVQAGDSLRLSCTASGPSDLNIEMGWFRQAPGKEREFVASISGQREYTYYADSVKGRFTISRDDARNTVYLQMNSLKPEDTAVYYCNVTVLLIPGGFTEYWGQGTQVTVSS

SEQ ID NO: 11233 - protein, 120 aa, synthetic construct
EVQLVESGGGLVQAGDSLRLSCTASGIQDRVLEMGWFRQAPGKEREFVASISKSDDRTYYADSVKGRFTISRDDARNTVYLQMNSLKPEDTAVYYCNVTGIGPHQFREYWGQGTQVTVSS

SEQ ID NO: 11234 - protein, 119 aa, synthetic construct
EVQLVESGGGLVQAGDSLRLSCTASGMSHRALEMGWFRQAPGKEREFVASISLWMQTYYADSVKGRFTISRDDARNTVYLQMNSLKPEDTAVYYCNVTRFDSHMFVEYWGQGTQVTVSS

SEQ ID NO: 11235 - protein, 120 aa, synthetic construct
EVQLVESGGGLVQAGDSLRLSCTASGVINTVLEMGWFRQAPGKEREFVASISWVQAYTYYADSVKGRFTISRDDARNTVYLQMNSLKPEDTAVYYCNVTVFRYGRFMEYWGQGTQVTVSS

SEQ ID NO: 11236 - protein, 123 aa, synthetic construct
EVQLVESGGGLVQAGDSLRLSCTASGIVGEVLEMGWFRQAPGKEREFVASISGSAVWTYYADSVKGRFTISRDDARNTVYLQMNSLKPEDTAVYYCNVTYVIDNGGIKFVEYWGQGTQVTVSS

SEQ ID NO: 11237 - protein, 120 aa, synthetic construct
EVQLVESGGGLVQAGDSLRLSCTASGIMSSVIEMGWFRQAPGKEREFVASISGMGSWTYYADSVKGRFTISRDDARNTVYLQMNSLKPEDTAVYYCNVTTLGNMIFFEYWGQGTQVTVSS

SEQ ID NO: 11238 - protein, 125 aa, synthetic construct
EVQLVESGGGLVQAGDSLRLSCTASGVCGKVMEMGWFRQAPGKEREFVASISGVGVRTYYADSVKGRFTISRDDARNTVYLQMNSLKPEDTAVYYCNVSVWIHDGMHTFGFGEYWGQGTQVTVSS

SEQ ID NO: 11239 - protein, 120 aa, synthetic construct
EVQLVESGGGLVQAGDSLRLSCTASGEMRGMLEMGWFRQAPGKEREFVASISAMMDYTYYADSVKGRFTISRDDARNTVYLQMNSLKPEDTAVYYCNVTICATGGWREYWGQGTQVTVSS

SEQ ID NO: 11240 - protein, 111 aa, synthetic construct
EVQLVESGGGLVQAGDSLRLSCTASGFLSGVMMMGWFRQAPGKEREFVAVITHRNGTYYADSVKGRFTISRDDARNTVYLQMNSLKPEDTAVYYCNVMEYWGQGTQVTVSS

SEQ ID NO: 11241 - protein, 123 aa, synthetic construct
EVQLVESGGGLVQAGDSLRLSCTASGRTFVFNRMGWFRQAPGKEREFVASISWDWDTTYYADSVKGRFTISRDDARNTVYLQMNSLKPEDTAVYYCNVMDGLINRQQKFVEYWGQGTQVTVSS

SEQ ID NO: 11242 - protein, 124 aa, synthetic construct
EVQLVESGGGLVQAGDSLRLSCTASGITGYVIEMGWFRQAPGKEREFVASISNVGTYTYYADSVKGRFTISRDDARNTVYLQMNSLKPEDTAVYYCNVVEVGKHAKSVSFNEYWGQGTQVTVSS

SEQ ID NO: 11243 - protein, 119 aa, synthetic construct
EVQLVESGGGLVQAGDSLRLSCTASGDECAVIEMGWFRQAPGKEREFVASISGGKLKTYYADSVKGRFTISRDDARNTVYLQMNSLKPEDTAVYYCRVTSWTGMFFEYWGQGTQVTVSS

SEQ ID NO: 11244 - protein, 120 aa, synthetic construct
EVQLVESGGGLVQAGDSLRLSCTASGSENVFIEMGWFRQAPGKEREFVASISQWRRYTYYADSVKGRFTISRDDARNTVYLQMNSLKPEDTAVYYCNVWLVTRDGFQEYWGQGTQVTVSS

SEQ ID NO: 11245 - protein, 118 aa, synthetic construct
EVQLVESGGGLVQAGDSLRLSCTASGSIVSLLWMGWFRQAPGKEREFVASISGLADLTYYADSVKGRFTISRDDARNTVYLQMNSLKPEDTAVYYCNVWAARPLHEYWGQGTQVTVSS

SEQ ID NO: 11246 - protein, 120 aa, synthetic construct
EVQLVESGGGLVQAGDSLRLSCTASGGADSCLEMGWFRQAPGKEREFVASISSRVAYTYYADSVKGRFTISRDDARNTVYLQMNSLKPEDTAVYYCNVTKLGISGFFEYWGQGTQVTVSS

SEQ ID NO: 11247 - protein, 121 aa, synthetic construct
EVQLVESGGGLVQAGDSLRLSCTASGGEDVALEMGWFRQAPGKEREFVASISCAGNYTYYADSVKGRFTISRDDARNTVYLQMNSLKPEDTAVYTERISYWPRQHSGNEYWGQGTQVTVSS

SEQ ID NO: 11248 - protein, 121 aa, synthetic construct
EVQLVESGGGLVQAGDSLRLSCTASGGRLVFIAMGWFRQAPGKEREFVASISAFGGSTYYADSVKGRFTISRDDARNTVYLQMNSLKPEDTAVYYCNVTQNEVFSIRGEYWGQGTQVTVSS

SEQ ID NO: 11249 - protein, 117 aa, synthetic construct
EVQLVESGGGLVQAGDSLRLSCTASGVSKVLMEMGWFRQAPGKEREFVASISARTDYTYYADSVKGRFTISRDDARNTVYLQMNSLKPEDTAVYYCNVTSQLFDEYWGQGTQVTVSS

SEQ ID NO: 11250 - protein, 119 aa, synthetic construct
EVQLVESGGGLVQAGDSLRLSCTASGPNKAVIEMGWFRQAPGKEREFVASISGTSTFTYYADSVKGRFTISRDDARNTVYLQMNSLKPEDTAVYYCNVVVIEHTFREYWGQGTQVTVSS

SEQ ID NO: 11251 - protein, 121 aa, synthetic construct
EVQLVESGGGLVQAGDSLRLSCTASGVNRLTVEMGWFRQAPGKEREFVASISGDHMYTYYADSVKGRFTISRDDARNTVYLQMNSLKPEDTAVYYCNVTVLNRQCEFHEYWGQGTQVTVSS

SEQ ID NO: 11252 - protein, 120 aa, synthetic construct
EVQLVESGGGLVQAGDSLRLSCTASGDTPTVVEMGWFRQAPGKEREFVASISGRDVNTYYADSVKGRFTISRDDARNTVYLQMNSLKPEDTAVYYCNVTLFVGSRFSEYWGQGTQVTVSS

SEQ ID NO: 11253 - protein, 120 aa, synthetic construct
EVQLVESGGGLVQAGDSLRLSCTASGNNVGIIEMGWFRQAPGKEREFVASISAVWHGTYYADSVKGRFTISRDDARNTVYLQMNSLKPEDTAVYYCNVTAIRPQSFREYWGQGTQVTVSS

SEQ ID NO: 11254 - protein, 120 aa, synthetic construct
EVQLVESGGGLVQAGDSLRLSCTASGNMLDAFFMGWFRQAPGKEREFVASIFYNIATYYADSVKGRFTISRDDARNTVYLQMNSLKPEDTAVYYCNVKVASDMWDAEEYWGQGTQVTVSS

SEQ ID NO: 11255 - protein, 124 aa, synthetic construct
EVQLVESGGGLVQAGDSLRLSCTASGDWGKCVEMGWFRQAPGKEREFVASISGRGVYTYYADSVKGRFTISRDDARNTVYLQMNSLKPEDTAVYYCNVTYFRHATGDVVFAEYWGQGTQVTVSS

SEQ ID NO: 11256 - protein, 121 aa, synthetic construct
EVQLVESGGGLVQAGDSLRLSCTASGQGYHVLEMGWFRQAPGKEREFVASISGQGRRTYYADSVKGRFTISRDDARNTVYLQMNSLKPEDTAVYYCNVTCLGTNGGFEEYWGQGTQVTVSS

SEQ ID NO: 11257 - protein, 119 aa, synthetic construct
EVQLVESGGGLVQAGDSLRLSCTASGNMEPIVEMGWFRQAPGKEREFVASISGRGRYTYYADSVKGRFTISRDDARNTVYLQMNSLKPEDTAVYYCNVVVIWDGFAEYWGQGTQVTVSS

SEQ ID NO: 11258 - protein, 118 aa, synthetic construct
EVQLVESGGGLVQAGDSLRLSCTASGIRTVFIGMGWFRQAPGKEREFVASISGFGGRTYYADSVKGRFTISRDDARNTVYLQMNSLKPEDTAVYYCNVDKEEGVDEYWGQGTQVTVSS

SEQ ID NO: 11259 - protein, 121 aa, synthetic construct
EVQLVESGGGLVQAGDSLRLSCTASGNRHIRIEMGWFRQAPGKEREFVASISAASNVTYYADSVKGRFTISRDDARNTVYLQMNSLKPEDTAVYYCNVTDLNHQLMFVEYWGQGTQVTVSS

SEQ ID NO: 11260 - protein, 121 aa, synthetic construct
EVQLVESGGGLVQAGDSLRLSCTASGMVGFIEMGWFRQAPGKEREFVASISHRLADTYYADSVKGRFTISRDDARNTVYLQMNSLKPEDTAVYYCNVTLVNWDTLNFYEYWGQGTQVTVSS

SEQ ID NO: 11261 - protein, 120 aa, synthetic construct
EVQLVESGGGLVQAGDSLRLSCTASGRNDAMIEMGWFRQAPGKEREFVASISGLCTYTYYADSVKGRFTISRDDARNTVYLQMNSLKPEDTAVYYCNVVAMGDNRILEYWGQGTQVTVSS

SEQ ID NO: 11262 - protein, 121 aa, synthetic construct
EVQLVESGGGLVQAGDSLRLSCTASGILAVSLEMGWFRQAPGKEREFVASISGVQLHTYYADSVKGRFTISRDDARNTVYLQMNSLKPEDTAVYYCNVTTWSWLAGFREYWGQGTQVTVSS

SEQ ID NO: 11263 - protein, 120 aa, synthetic construct
EVQLVESGGGLVQAGDSLRLSCTASGNTHQVLEMGWFRQAPGKEREFVASISGMMAYTYYADSVKGRFTISRDDARNTVYLQMNSLKPEDTAVYYCNVTSFAVGSLWEYWGQGTQVTVSS

SEQ ID NO: 11264 - protein, 120 aa, synthetic construct
EVQLVESGGGLVQAGDSLRLSCTASGVTGWLIEMGWFRQAPGKEREFVASISSADGGTYYADSVKGRFTISRDDARNTVYLQMNSLKPEDTAVYYCNVTSIIHKKFVEYWGQGTQVTVSS

SEQ ID NO: 11265 - protein, 120 aa, synthetic construct
EVQLVESGGGLVQAGDSLRLSCTASGYVGILVEMGWFRQAPGKEREFVASISGRGSLTYYADSVKGRFTISRDDARNTVYLQMNSLKPEDTAVYYCNVTVLVPDGFQEYWGQGTQVTVSS

SEQ ID NO: 11266 - protein, 120 aa, synthetic construct
EVQLVESGGGLVQAGDSLRLSCTASGGIGWVLEMGWFRQAPGKEREFVASISSNMRATYYADSVKGRFTISRDDARNTVYLQMNSLKPEDTAVYYCNVVKIVDCQFVEYWGQGTQVTVSS

SEQ ID NO: 11267 - protein, 120 aa, synthetic construct
EVQLVESGGGLVQAGDSLRLSCTASGGQDVAIEMGWFRQAPGKEREFVASISGRTQYTYYADSVKGRFTISRDDARNTVYLQMNSLKPEDTAVYYCNVVAVNDNRICEYWGQGTQVTVSS

SEQ ID NO: 11268 - protein, 119 aa, synthetic construct
EVQLVESGGGLVQAGDSLRLSCTASGRMGLSIEMGWFRQAPGKEREFVASISGGNGKTYYADSVKGRFTISRDDARNTVYLQMNSLKPEDTAVYYCNVTVFYHGFKEYWGQGTQVTVSS

SEQ ID NO: 11269 - protein, 120 aa, synthetic construct
EVQLVESGGGLVQAGDSLRLSCTASGIMGQNVEMGWFRQAPGKEREFVASISGKDSKTYYADSVKGRFTISRDDARNTVYLQMNSLKPEDTAVYYCNVVQYTNMRFDEYWGQGTQVTVSS

SEQ ID NO: 11270 - protein, 122 aa, synthetic construct
EVQLVESGGGLVQAGDSLRLSCTASGIQDNCIEMGWFRQAPGKEREFVASISGTQAYTYYADSVKGRFTISRDDARNTVYLQMNSLKPEDTAVYYCNVVTLLSRVPYVMEYWGQGTQVTVSS

SEQ ID NO: 11271 - protein, 120 aa, synthetic construct
EVQLVESGGGLVQAGDSLRLSCTASGVVGRAMEMGWFRQAPGKEREFVASISVTEWYTYYADSVKGRFTISRDDARNTVYLQMNSLKPEDTAVYYCNVIVVRDCNFVEYWGQGTQVTVSS

SEQ ID NO: 11272 - protein, 120 aa, synthetic construct
EVQLVESGGGLVQAGDSLRLSCTASGKANAVLAMDWFRQAPGKEREFVASISGYCIYTYYADSVKGRFTISRDDARNTVYLQMNSLKPEDTAVYYCNVVMVLNSMIQEYWGQGTQVTVSS

SEQ ID NO: 11273 - protein, 119 aa, synthetic construct
EVQLVESGGGLVQAGDSLRLSCTASGMGKVMLEMGWFRQAPGKEREFVASISGYTDYTYYADSVKGRFTISRDDARNTVYLQMNSLKPEDTAVYYCNVVIVDNDIREYWGQGTQVTVSS

SEQ ID NO: 11274 - protein, 120 aa, synthetic construct
EVQLVESGGGLVQAGDSLRLSCTASGLIGVVMEMGWFRQAPGKEREFVASISMYNALTYYADSVKGRFTISRDDARNTVYLQMNSLKPEDTAVYYCNVTGLTDAGFYEYWGQGTQVTVSS

SEQ ID NO: 11275 - protein, 120 aa, synthetic construct
EVQLVESGGGLVQAGDSLRLSCTASGWCWNMIDMGWFRQAPGKEREFVASISGNDVYTYYADSVKGRFTISRDDARNTVYLQMNSLKPEDTAVYYCNVTAVVLGGFREYWGQGTQVTVSS

SEQ ID NO: 11276 - protein, 123 aa, synthetic construct
EVQLVESGGGLVQAGDSLRLSCTASGGDRHVIEMGWFRQAPGKEREFVASISGTLTYTYYADSVKGRFTISRDDARNTVYLQMNSLKPEDTAVYYCNVTLMVLGTGSCFTEYWGQGTQVTVSS

SEQ ID NO: 11277 - protein, 121 aa, synthetic construct
EVQLVESGGGLVQAGDSLRLSCTASGFRRGLVAMDWFRQAPGKEREFVASISGSNCGTYYADSVKGRFTISRDDARNTVYLQMNSLKPEDTAVYYCNVTRYLVGYGFVEYWGQGTQVTVSS

SEQ ID NO: 11278 - protein, 119 aa, synthetic construct
EVQLVESGGGLVQAGDSLRLSCTASGGHGLVIEMGWFRQAPGKEREFVASISVAMAYTYYADSVKGRFTISRDDARNTVYLQMNSLKPEDTAVYYCNVTELADRFKEYWGQGTQVTVSS

SEQ ID NO: 11279 - protein, 121 aa, synthetic construct
EVQLVESGGGLVQAGDSLRLSCTASGHMGMVIEMGWFRQAPGKEREFVASISWQAQYTYYADSVKGRFTISRDDARNTVYLQMNSLKPEDTAVYYCNVTQIGANGIFREYWGQGTQVTVSS

SEQ ID NO: 11280 - protein, 122 aa, synthetic construct
EVQLVESGGGLVQAGDSLRLSCTASGRQECQVIMGWFRQAPGKEREFVASISGVGEVTYYADSVKGRFTISRDDARNTVYLQMNSLKPEDTAVYYCNVQVVWPRLCWGEEYWGQGTQVTVSS

SEQ ID NO: 11281 - protein, 119 aa, synthetic construct
EVQLVESGGGLVQAGDSLRLSCTASGVTSLRVLMGWFRQAPGKEREFVASISMEHDVTYYADSVKGRFTISRDDARNTVYLQMNSLKPEDTAVYYCNVLVVDWVWREYWGQGTQVTVSS

SEQ ID NO: 11282 - protein, 119 aa, synthetic construct
EVQLVESGGGLVQAGDSLRLSCTASGQSDGVIEMGWFRQAPGKEREFVASISARDRGTYYADSVKGRFTISRDDARNTVYLQMNSLKPEDTAVYYCNVTALKRVFQEYWGQGTQVTVSS

SEQ ID NO: 11283 - protein, 121 aa, synthetic construct
EVQLVESGGGLVQAGDSLRLSCTASGDAVTVLEMGWFRQAPGKEREFVASISGTGLYTYYADSVKGRFTISRDDARNTVYLQMNSLKPEDTAVYYCNVSMVMRRGGLMEYWGQGTQVTVSS

SEQ ID NO: 11284 - protein, 125 aa, synthetic construct
EVQLVESGGGLVQAGDSLRLSCTASGIAGMVIEMGWFRQAPGKEREFVASISGALLDTYYADSVKGRFTISRDDARNTVYLQMNSLKPEDTAVYYCNVTLWHHHSRYGFRFTEYWGQGTQVTVSS

SEQ ID NO: 11285 - protein, 120 aa, synthetic construct
EVQLVESGGGLVQAGDSLRLSCTASGSRGSALEMGWFRQAPGKEREFVASISASGAYTYYADSVKGRFTISRDDARNTVYLQMNSLKPEDTAVYYCNVTAFVISVFREYWGQGTQVTVSS

SEQ ID NO: 11286 - protein, 120 aa, synthetic construct
EVQLVESGGGLVQAGDSLRLSCTASGMLSHALEMGWFRQAPGKEREFVASIGRTAGTYYADSVKGRFTISRDDARNTVYLQMNSLKPEDTAVYYCNVTVYVPVVGFNEYWGQGTQVTVSS

SEQ ID NO: 11287 - protein, 120 aa, synthetic construct
EVQLVESGGGLVQAGDSLRLSCTASGCVKGVVEMGWFRQAPGKEREFVASISGWSEYTYYADSVKGRFTISRDDARNTVYLQMNSLKPEDTAVYYCNVSDVFNYMFREYWGQGTQVTVSS

SEQ ID NO: 11288 - protein, 120 aa, synthetic construct
EVQLVESGGGLVQAGDSLRLSCTASGDVKTFLEMGWFRQAPGKEREFVASISIQYHGTYYADSVKGRFTISRDDARNTVYLQMNSLKPEDTAVYYCNVTRLNYNGFMEYWGQGTQVTVSS

SEQ ID NO: 11289 - protein, 120 aa, synthetic construct
EVQLVESGGGLVQAGDSLRLSCTASGMRIVFQPMGWFRQAPGKEREFVASISWDWRVTYYADSVKGRFTISRDDARNTVYLQMNSLKPEDTAVYYCNVGQVNPLHRREYWGQGTQVTVSS

SEQ ID NO: 11290 - protein, 120 aa, synthetic construct
EVQLVESGGGLVQAGDSLRLSCTASGLDAVVIEMGWFRQAPGKEREFVASISGRDAGTYYADSVKGRFTISRDDARNTVYLQMNSLKPEDTAVYYCNVWVFTTGTFREYWGQGTQVTVSS

SEQ ID NO: 11291 - protein, 122 aa, synthetic construct
EVQLVESGGGLVQAGDSLRLSCTASGLGGIVLEMGWFRQAPGKEREFVASISNNQMYTYYADSVKGRFTISRDDARNTVYLQMNSLKPEDTAVYYCNVTTICAAAHKISEYWGQGTQVTVSS

SEQ ID NO: 11292 - protein, 120 aa, synthetic construct
EVQLVESGGGLVQAGDSLRLSCTASGVRLVFQSMGWFRQAPGKEREFVASISGFHSATYYADSVKGRFTISRDDARNTVYLQMNSLKPEDTAVYYCNVLLPVSVALGEYWGQGTQVTVSS

SEQ ID NO: 11293 - protein, 119 aa, synthetic construct
EVQLVESGGGLVQAGDSLRLSCTASGVEGVGLEMGWFRQAPGKEREFVASISVLDGLTYYADSVKGRFTISRDDARNTVYLQMNSLKPEDTAVYYCNVTVFATMFREYWGQGTQVTVSS

SEQ ID NO: 11294 - protein, 119 aa, synthetic construct
EVQLVESGGGLVQAGDSLRLSCTASGSITCMIDMGWFRQAPGKEREFVASISTVGVYTYYADSVKGRFTISRDDARNTVYLQMNSLKPEDTAVYYCNVTTCVGGFVEYWGQGTQVTVSS

SEQ ID NO: 11295 - protein, 121 aa, synthetic construct
EVQLVESGGGLVQAGDSLRLSCTASGNIGRVLEMGWFRQAPGKEREFVASISGTGCMTYYADSVKGRFTISRDDARNTVYLQMNSLKPEDTAVYYCNVTGLRCECSFAEYWGQGTQVTVSS

SEQ ID NO: 11296 - protein, 120 aa, synthetic construct
EVQLVESGGGLVQAGDSLRLSCTASGDLAVVVEMGWFRQAPGKEREFVASISERHEYTYYADSVKGRFTISRDDARNTVYLQMNSLKPEDTAVYYCNVVSIRGHQFVEYWGQGTQVTVSS

SEQ ID NO: 11297 - protein, 121 aa, synthetic construct
EVQLVESGGGLVQAGDSLRLSCTASGDVACVVEMGWFRQAPGKEREFVASISTRGAYTYYADSVKGRFTISRDDARNTVYLQMNSLKPEDTAVYYCNVTRLTIRGLMYEYWGQGTQVTVSS

SEQ ID NO: 11298 - protein, 119 aa, synthetic construct
EVQLVESGGGLVQAGDSLRLSCTASGVIGNVVEMGWFRQAPGKEREFVASISGVRDATYYADSVKGRFTISRDDARNTVYLQMNSLKPEDTAVYYCNVTALWNRFLEYWGRGTQVTVSS

SEQ ID NO: 11299 - protein, 122 aa, synthetic construct
EVQLVESGGGLVQAGDSLRLSCTASGGRGDVIEMGWFRQAPGKEREFVASISGHRGETYYADSVKGRFTISRDDARNTVYLQMNSLKPEDTAVYYCNVTMFGIVGRCFKEYWGQGTQVTVSS

SEQ ID NO: 11300 - protein, 124 aa, synthetic construct
EVQLVESGGGLVQAGDSLRLSCTASGIKAGVLEMGWFRQAPGKEREFVASISGIGRYTYYADSVKGRFTISRDDARNTVYLQMNSLKPEDTAVYYCNVTCFRMGLNTPLLIEYWGQGTQVTVSS

SEQ ID NO: 11301 - protein, 120 aa, synthetic construct
EVQLVESGGGLVQAGDSLRLSCTASGNNHKVLEMGWFRQAPGKEREFVASISHANLYTYYADSVKGRFTISRDDARNTVYLQMNSLKPEDTAVYYCNVTALVLGVFVEYWGQGTQVTVSS

SEQ ID NO: 11302 - protein, 120 aa, synthetic construct
EVQLVESGGGLVQAGDSLRLSCTASGNRPLVIEMGWFRQAPGKEREFVASISARVGVTYYADSVKGRFTISRDDARNTVYLQMNSLKPEDTAVYYCNVTVLGLNRFVEYWGQGTQVTVSS

SEQ ID NO: 11303 - protein, 120 aa, synthetic construct
EVQLVESGGGLVQAGDSLRLSCTASGFVPSPLEMGWFRQAPGKEREFVASISNGNIYTYYADSVKGRFTISRDDARNTVYLQMNSLKPEDTAVYYCNVVWFTFVKFVEYWGQGTQVTVSS

SEQ ID NO: 11304 - protein, 121 aa, synthetic construct
EVQLVESGGGLVQAGDSLRLSCTASGTDGTRIDMGWFRQAPGKEREFVASISEYQRHTYYADSVKGRFTISRDDARNTVYLQMNSLKPEDTAVYYCNVTVVVTGRGFLEYWGQGTQVTVSS

SEQ ID NO: 11305 - protein, 123 aa, synthetic construct
EVQLVESGGGLVQAGDSLRLSCTASGVNVLTFRMGWFRQAPGKEREFVASISRGLDVTYYADSVKGRFTISRDDARNTVYLQMNSLKPEDTAVYYCNVEVCLIGVEFKFSEYWGQGTQVTVSS

SEQ ID NO: 11306 - protein, 120 aa, synthetic construct
EVQLVESGGGLVQAGDSLRLSCTASGSVANTIEMGWFRQAPGKEREFVASISNDLRYTYYADSVKGRFTISRDDARNTVYLQMNSLKPEDTAVYYCNVTGMGVRGKREYWGQGTQVTVSS

SEQ ID NO: 11307 - protein, 120 aa, synthetic construct
EVQLVESGGGLVQAGDSLRLSCTASGKVEWILEMGWFRQAPGKEREFVASISGHASYTYYADSVKGRFTISRDDARNTVYLQMNSLKPEDTAVYYCNVVGVGKLSIREYWGQGTQVTVSS

SEQ ID NO: 11308 - protein, 118 aa, synthetic construct
EVQLVESGGGLVQAGDSLRLSCTASGDGVLEMGWFRQAPGKEREFVASISATTVYTYYADSVKGRFTISRDDARNTVYLQMNSLKPEDTAVYYCNVVALGKRGFAEYWGQGTQVTVSS

SEQ ID NO: 11309 - protein, 121 aa, synthetic construct
EVQLVESGGGLVQAGDSLRLSCTASGRMARVVEMGWFRQAPGKEREFVASISGHKAYTYYADSVKGRFTISRDDARNTVYLQMNSLKPEDTAVYYCNVVYLAPSIMFEEYWGQGTQVTVSS

SEQ ID NO: 11310 - protein, 119 aa, synthetic construct
EVQLVESGGGLVQAGDSLRLSCTASGTTSGSIEMGWFRQAPGKEREFVASISVRQCSTYYADSVKGRFTISRDDARNTVYLQMNSLKPEDTAVYYCNVTVLITRFEEYWGQGTQVTVSS

SEQ ID NO: 11311 - protein, 120 aa, synthetic construct
EVQLVESGGGLVQAGDSLRLSCTASGTPNTLLEMGWFRQAPGKEREFVASISMIGWYTYYADSVKGRFTISRDDARNTVYLQMNSLKPEDTAVYYCNVTINIGFGFREYWGQGTQVTVSS

SEQ ID NO: 11312 - protein, 120 aa, synthetic construct
EVQLVESGGGLVQAGDSLRLSCTASGEDAMTIEMGWFRQAPGKEREFVASISGSSIETYYADSVKGRFTISRDDARNTVYLQMNSLKPEDTAVYYCNVTRLHYGHFAEYWGQGTQVTVSS

SEQ ID NO: 11313 - protein, 120 aa, synthetic construct
EVQLVESGGGLVQAGDSLRLSCTASGQDCGWVEMGWFRQAPGKEREFVASISRWSTYTYYADSVKGRFTISRDDARNTVYLQMNSLKPEDTAVYYCNVTAFVNCRFVEYWGQGTQVTVSS

SEQ ID NO: 11314 - protein, 121 aa, synthetic construct
EVQLVESGGGLVQAGDSLRLSCTASGSRYHVIEMGWFRQAPGKEREFVASISGSGAYTYYADSVKGRFTISRDDARNTVYLQMNSLKPEDTAVYYCNVVVVHGGGNITEYWGQGTQVTVSS

SEQ ID NO: 11315 - protein, 120 aa, synthetic construct
EVQLVESGGGLVQAGDSLRLSCTASGAGTHAIEMGWFRQAPGKEREFVASISGINKGTYYADSVKGRFTISRDDARNTVYLQMNSLKPEDTAVYYCNVTCIKNGRFVEYWGQGTQVTVSS

SEQ ID NO: 11316 - protein, 120 aa, synthetic construct
EVQLVESGGGLVQAGDSLRLSCTASGIFGETVEMGWFRQAPGKEREFVASISYYRGYTYYADSVKGRFTISRDDARNTVYLQMNSLKPEDTAVYYCNVTLLSHWTFCEYWGQGTQVTVSS

SEQ ID NO: 11317 - protein, 124 aa, synthetic construct
EVQLVESGGGLVQAGDSLRLSCTASGNVGVILEMGWFRQAPGKEREFVASISGNARYTYYADSVKGRFTISRDDARNTVYLQMNSLKPEDTAVYYCNVTGMMLNDLGFKMSEYWGQGTQVTVSS

SEQ ID NO: 11318 - protein, 119 aa, synthetic construct
EVQLVESGGGLVQAGDSLRLSCTASGNMASAIEMGWFRQAPGKEREFVASISWREIYTYYADSVKGRFTISRDDARNTVYLQMNSLKPEDTAVYYCNVTCMRMTVDEYWGQGTQVTVSS

SEQ ID NO: 11319 - protein, 123 aa, synthetic construct
EVQLVESGGGLVQAGDSLRLSCTASGQIEKPIEMGWFRQAPGKEREFVASISMATDYTYYADSVKGRFTISRDDARNTVYLQMNSLKPEDTAVYYCNVTSFGIVCTFTFTEYWGQGTQVTVSS

SEQ ID NO: 11320 - protein, 119 aa, synthetic construct
EVQLVESGGGLVQAGDSLRLSCTASGSKGNDIDMGWFRQAPGKEREFVASISWYANVTYYADSVKGRFTISRDDARNTVYLQMNSLKPEDTAVYYCNVVVWGIRWCEYWGQGTQVTVSS

SEQ ID NO: 11321 - protein, 120 aa, synthetic construct
EVQLVESGGGLVQAGDSLRLSCTASGNRGSIIEMGWFRQAPGKEREFVASISGHDTYTYYADSVKGRFTISRDDARNTVYLQMNSLKPEDTAVYYCNVVVVAGKYIVEYWGQGTQVTVSS

SEQ ID NO: 11322 - protein, 124 aa, synthetic construct
EVQLVESGGGLVQAGDSLRLSCTASGSLSNILEMGWFRQAPGKEREFVASISGRVEYTYYADSVKGRFTISRDDARNTVYLQMNSLKPEDTAVYYCNVSAFGMQGDRPAFNEYWGQGTQVTVSS

SEQ ID NO: 11323 - protein, 120 aa, synthetic construct
EVQLVESGGGLVQAGDSLRLSCTASGREAPILEMGWFRQAPGKEREFVASISSNLVYTYYADSVKGRFTISRDDARNTVYLQMNSLKPEDTAVYYCNVVMVNSMSIREYWGQGTQVTVSS

SEQ ID NO: 11324 - protein, 120 aa, synthetic construct
EVQLVESGGGLVQAGDSLRLSCTASGRTAMVYFMGWFRQAPGKEREFVASISVKGRTTYYADSVKGRFTISRDDARNTVYLQMNSLKPEDTAVYYCNVDLWGEMVLVEYWGQGTQVTVSS

SEQ ID NO: 11325 - protein, 120 aa, synthetic construct
EVQLVESGGGLVQAGDSLRLSCTASGNISGKVEMGWFRQAPGKEREFVASISCHQDYTYYADSVKGRFTISRDDARNTVYLQMNSLKPEDTAVYYCNVVSHSGRAFREYWGQGTQVTVSS

SEQ ID NO: 11326 - protein, 121 aa, synthetic construct
EVQLVESGGGLVQAGDSLRLSCTASGVYSSILEMGWFRQAPGKEREFVASISTRGMYTYYADSVKGRFTISRDDARNTVYLQMNSLKPEDTAVYYCNVTAFDCSIMFAEYWGQGTQVTVSS

SEQ ID NO: 11327 - protein, 120 aa, synthetic construct
EVQLVESGGGLVQAGDSLRLSCTASGIMGNVLEMGWFRQAPGKEREFVASISSASFYTYYADSVKGRFTISRDDARNTVYLQMNSLKPEDTAVYYCNVWVIRLGGFNEYWGQGTQVTVSS

SEQ ID NO: 11328 - protein, 120 aa, synthetic construct
EVQLVESGGGLVQAGDSLRLSCTASGVDGLVLEMGWFRQAPGKEREFVASISTRAQWTYYADSVKGRFTISRDDARNTVYLQMNSLKPEDTAVYYCNVTSWDANGFVEYWGQGTQVTVSS

SEQ ID NO: 11329 - protein, 120 aa, synthetic construct
EVQLVESGGGLVQAGDSLRLSCTASGVNGVPMEMGWFRQAPGKEREFVASISVARGQTYYADSVKGRFTISRDDARNTVYLQMNSLKPEDTAVYYCNVTSIVDRGWTEYWGQGTQVTVSS

SEQ ID NO: 11330 - protein, 125 aa, synthetic construct
EVQLVESGGGLVQAGDSLRLSCTASGVERDFLEMGWFRQAPGKEREFVASISGLPHYTYYADSVKGRFTISRDDARNTVYLQMNSLKPEDTAVYYCNVTTVYVRGGLTIRFVEYWGQGTQVTVSS

SEQ ID NO: 11331 - protein, 120 aa, synthetic construct
EVQLVESGGGLVQAGDSLRLSCTASGDGHGMVEMGWFRQAPGKEREFVASISRVGLYTYYADSVKGRFTISRDDARNTVYLQMNSLKPEDTAVYYCNVVVVVMARFMEYWGQGTQVTVSS

SEQ ID NO: 11332 - protein, 117 aa, synthetic construct
EVQLVESGGGLVQAGDSLRLSCTASGNIRSNLEMGWFRQAPGKEREFVASISMCSVYTYYADSVKGRFTISRDDARNTVYLQMNSLKPEDTAVYYCNVTTFGFVEYWGQGTQVTVSS

SEQ ID NO: 11333 - protein, 120 aa, synthetic construct
EVQLVESGGGLVQAGDSLRLSCTASGGRIVFTDMGWFRQAPGKEREFVASISGFQICTYYADSVKGRFTISRDDARNTVYLQMNSLKPEDTAVYYCNVCNIERKSTQEYWGQGTQVTVSS

SEQ ID NO: 11334 - protein, 117 aa, synthetic construct
EVQLVESGGGLVQAGDSLRLSCTASGNSGLLLAMDWFRQAPGKEREFVASISCSIAYTYYADSVKGRFTISRDDARNTVYLQMNSLKPEDTAVYYCNVLDNRFKEYWGQGTQVTVSS

SEQ ID NO: 11335 - protein, 121 aa, synthetic construct
EVQLVESGGGLVQAGDSLRLSCTASGSRGSRIEMGWFRQAPGKEREFVASTSGDGSYTYYADSVKGRFTISRDDARNTVYLQMNSLKPEDTAVYYCNVVDYDGIVSFYEYWGQGTQVTVSS

SEQ ID NO: 11336 - protein, 121 aa, synthetic construct
EVQLVESGGGLVQAGDSLRLSCTASGVQGGMLSMDWFRQAPGKEREFVASISASRTYTYYADSVKGRFTISRDDARNTVYLQMNSLKPEDTAVYYCNVVGFNRITGFFEYWGQGTQVTVSS

SEQ ID NO: 11337 - protein, 120 aa, synthetic construct
EVQLVESGGGLVQAGDSLRLSCTASGMIGLVLEMGWFRQAPGKEREFVASISRLGRYTYYADSVKGRFTISRDDARNTVYLQMNSLKPEDTAVYYCNVSCLVDIALREYWGQGTQVTVSS

SEQ ID NO: 11338 - protein, 120 aa, synthetic construct
EVQLVESGGGLVQAGDSLRLSCTASGIGLDVIEMGWFRQAPGKEREFVASISGRCVYTYYADSVKGRFTISRDDARNTVYLQMNSLKPEDTAVYYCNVVLVTVARIVEYWGQGTQVTVSS

SEQ ID NO: 11339 - protein, 121 aa, synthetic construct
EVQLVESGGGLVQAGDSLRLSCTASGQKHRVLEMGWFRQAPGKEREFVASISGLCQYTYYADSVKGRFTISRDDARNTVYLQMNSLKPEDTAVYYCNVVEVSIRGVFKEYWGQGTQVTVSS

SEQ ID NO: 11340 - protein, 120 aa, synthetic construct
EVQLVESGGGLVQAGDSLRLSCTASGMVRNVLDMGWFRQAPGKEREFVASISALQVYTYYADSVKGRFTISRDDARNTVYLQMNSLKPEDTAVYYCNVTAFNDRTFSEYWGQGTQVTVSS

SEQ ID NO: 11341 - protein, 121 aa, synthetic construct
EVQLVESGGGLVQAGDSLRLSCTASGTHSRVIEMGWFRQAPGKEREFVASISARDAYTYYADSVKGRFTISRDDARNTVYLQMNSLKPEDTAVYYCNLVTVLGCGRFSEYWGQGTQVTVSS

SEQ ID NO: 11342 - protein, 120 aa, synthetic construct
EVQLVESGGGLVQAGDSLRLSCTASGSDGTRVEMGWFRQAPGKEREFVASISSSLVYTYYADSVKGRFTISRDDARNTVYLQMNSLKPEDTAVYYCNVTNIERGRFVEYWGQGTQVTVSS

SEQ ID NO: 11343 - protein, 120 aa, synthetic construct
EVQLVESGGGLVQAGDSLRLSCTASGMRSTVLEMGWFRQAPGKEREFVASISGRGFWTYYADSVKGRFTISRDDARNTVYLQMNSLKPEDTAVYYCNVTRHAMGRFSEYWGQGTQVTVSS

SEQ ID NO: 11344 - protein, 120 aa, synthetic construct
EVQLVESGGGLVQAGDSLRLSCTASGLMGDVIEMGWFRQAPGKEREFVASISRVGRYTYYADSVKGRFTISRDDARNTVYLQMNSLKPEDTAVYYCNVTLFSKVRIVEYWGQGTQVTVSS

SEQ ID NO: 11345 - protein, 121 aa, synthetic construct
EVQLVESGGGLVQAGDSLRLSCTASGLLQRIVEMGWFRQAPGKEREFVASISGYAVYTYYADSVKGRFTISRDDARNTVYLQMNSLKPEDTAVYYCNVVLLDQGHRFMEYWGQGTQVTVSS

SEQ ID NO: 11346 - protein, 121 aa, synthetic construct
EVQLVESGGGLVQAGDSLRLSCTASGKGNYLLEMGWFRQAPGKEREFVASISAIKTYTYYADSVKGRFTISRDDARNTVYLQMNSLKPEDTAVYYCNVTYVVDGGGFREYWGQGTQVTVSS

SEQ ID NO: 11347 - protein, 122 aa, synthetic construct
EVQLVESGGGLVQAGDSLRLSCTASGMVGNFIEMGWFRQAPGKEREFVASISGVSAYTYYADSVKGRFTISRDDARNTVYLQMNSLKPEDTAVYYCNVVKYVIDEAVFREYWGQGTQVTVSS

SEQ ID NO: 11348 - protein, 120 aa, synthetic construct
EVQLVESGGGLVQAGDSLRLSCTASGSVGQFVEMGWFRQAPGKEREFVASISNALAYTYYADSVKGRFTISRDDARNTVYLQMNSLKPEDTAVYYCNVTALIGVRFVEYWGQGTQVTVSS

SEQ ID NO: 11349 - protein, 120 aa, synthetic construct
EVQLVESGGGLVQAGDSLRLSCTASGIRGAAMEMGWFRQAPGKEREFVASISGNSRYTYYADSVKGRFTISRDDARNTVYLQMNSLKPEDTAVYYCNVVAIDPRGFMEYWGQGTQVTVSS

SEQ ID NO: 11350 - protein, 120 aa, synthetic construct
EVQLVESGGGLVQAGDSLRLSCTASGLRGIVMEMGWFRQAPGKEREFVASISGRGDYTYYADSVKGRFTISRDDARNTVYLQMNSLKPEDTAVYYCNVLVWMIKLISEYWGQGTQVTVSS

SEQ ID NO: 11351 - protein, 120 aa, synthetic construct
EVQLVESGGGLVQAGDSLRLSCTASGMGDDFIEMGWFRQAPGKEREFVASISGKFIYTYYADSVKGRFTISRDDARNTVYLQMNSLKPEDTAVYYCNVCVWRGYGIKEYWGQGTQVTVSS

SEQ ID NO: 11352 - protein, 121 aa, synthetic construct
EVQLVESGGGLVQAGDSLRLSCTASGKHGVGLEMGWFRQAPGKEREFVASISMREIRTYYADSVKGRFTISRDDARNTVYLQMNSLKPEDTAVYYCNVTMFSVVVGFSEYWGQGTQVTVSS

SEQ ID NO: 11353 - protein, 121 aa, synthetic construct
EVQLVESGGGLVQAGDSLRLSCTASGVRGLVMEMGWFRQAPGKEREFVASISGTQFYTYYADSVKGRFTISRDDARNTVYLQMNSLKPEDTAVYYCNVVSVAGTRVFQEYWGQGTQVTVSS

SEQ ID NO: 11354 - protein, 124 aa, synthetic construct
EVQLVESGGGLVQAGDSLRLSCTASGTRLVFRVMGWFRQAPGKEREFVASISGFHLRTYYADSVKGRFTISRDDARNTVYLQMNSLKPEDTAVYYCNVLHDDGPRGLEVGYEYWGQGTQVTVSS

SEQ ID NO: 11355 - protein, 117 aa, synthetic construct
EVQLVESGGGLVQAGDSLRLSCTASGKFVRMGWFRQAPGKEREFVASISGESQMTYYADSVKGRFTISRDDARNTVYLQMNSLKPEDTAVYYCNVLSFSVYCFGEYWGQGTQVTVSS

SEQ ID NO: 11356 - protein, 119 aa, synthetic construct
EVQLVESGGGLVQAGDSLRLSCTASGRRVRILEMGWFRQAPGKEREFVASISGSANYTYYADSVKGRFTISRDDARNTVYLQMNSLKPEDTAVYYCNVTAVMVRLVEYWGQGTQVTVSS

SEQ ID NO: 11357 - protein, 121 aa, synthetic construct
EVQLVESGGGLVQAGDSLRLSCTASGVAGIPIEMGWFRQAPGKEREFVASISTRGNYTYYADSVKGRFTISRDDARNTVYLQMNSLKPEDTAVYYCNVTSVLDKARMVEYWGQGTQVTVSS

SEQ ID NO: 11358 - protein, 120 aa, synthetic construct
EVQLVESGGGLVQAGDSLRLSCTASGILGDVMEMGWFRQAPGKEREFVASISGWIIYTYYADSVKGRFTISRDDARNTVYLQMNSLKPEDTAVYYCNVSSFMGRNIREYWGQGTQVTVSS

SEQ ID NO: 11359 - protein, 119 aa, synthetic construct
EVQLVESGGGLVQAGDSLRLSCTASGGVDSVLEMGWFRQAPGKEREFVASISKLHMDTYYADSVKGRFTISRDDARNTVYLQMNSLKPEDTAVYYCRQSQFHARLVEYWGQGTQVTVSS

SEQ ID NO: 11360 - protein, 120 aa, synthetic construct
EVQLVESGGGLVQAGDSLRLSCTASGSCGAVIEMGWFRQAPGKEREFVASISASCSETYYADSVKGRFTISRDDARNTVYLQMNSLKPEDTAVYYCNVTRFVDRCFREYWGQGTQVTVSS

SEQ ID NO: 11361 - protein, 120 aa, synthetic construct
EVQLVESGGGLVQAGDSLRLSCTASGFTQALIEMGWFRQAPGKEREFVASISGLGRYTYYADSVKGRFTISRDDARNTVYLQMNSLKPEDTAVYYCNVWSLDNGVFGEYWGQGTQVTVSS

SEQ ID NO: 11362 - protein, 120 aa, synthetic construct
EVQLVESGGGLVQAGDSLRLSCTASGRVSVVLEMGWFRQAPGKEREFVASISGGIDYTYYADSVKGRFTISRDDARNTVYLQMNSLKPEDTAVYYCNVVSLIKRSFVEYWGQGTQVTVSS

SEQ ID NO: 11363 - protein, 124 aa, synthetic construct
EVQLVESGGGLVQAGDSLRLSCTASGGVKTCLEMGWFRQAPGKEREFVASISVRHGVTYYADSVKGRFTISRDDARNTVYLQMNSLKPEDTAVYYCNVTICDLSGIRGRFVEYWGQGTQVTVSS

SEQ ID NO: 11364 - protein, 120 aa, synthetic construct
EVQLVESGGGLVQAGDSLRLSCTASGCNQTIIEMGWFRQAPGKEREFVASISITGVYTYYADSVKGRFTISRDDARNTVYLQMNSLKPEDTAVYYCNVVIFDLMRFKEYWGQGTQVTVSS

SEQ ID NO: 11365 - protein, 120 aa, synthetic construct
EVQLVESGGGLVQAGDSLRLSCTASGHDGTDLEMGWFRQAPGKEREFVASISMMGYGTYYADSVKGRFTISRDDARNTVYLQMNSLKPEDTAVYYCNVTILAGGAFREYWGQGTQVTVSS

SEQ ID NO: 11366 - protein, 121 aa, synthetic construct
EVQLVESGGGLVQAGDSLRLSCTASGVDQIVLEMGWFRQAPGKEREFVASISMYRTYTYYADSVKGRFTISRDDARNTVYLQMNSLKPEDTAVYYCNVTVHIVGRGFREYWGQGTQVTVSS

SEQ ID NO: 11367 - protein, 125 aa, synthetic construct
EVQLVESGGGLVQAGDSLRLSCTASGFMEVDGQMGWFRQAPGKEREFVASISKPVQLTYYADSVKGRFTISRDDARNTVYLQMNSLKPEDTAVYYCNVRGFVTVDGSVYRYGEYWGQGTQVTVSS

SEQ ID NO: 11368 - protein, 117 aa, synthetic construct
EVQLVESGGGLVQAGDSLRLSCTASGGRIVFLPMGWFRQAPGKEREFVASISGFRLATYYADSVKGRFTISRDDARNTVYLQMNSLKPEDTAVYYCNVISEGNREYWGQGTQVTVSS

SEQ ID NO: 11369 - protein, 120 aa, synthetic construct
EVQLVESGGGLVQAGDSLRLSCTASGEIALVIEMGWFRQAPGKEREFVASISGLGTYTYYADSVKGRFTISRDDARNTVYLQMNSLKPEDTAVYYCNVVSLFRMMFVEYWGQGTQVTVSS

SEQ ID NO: 11370 - protein, 120 aa, synthetic construct
EVQLVESGGGLVQAGDSLRLSCTASGVDGMIVDMGWFRQAPGKEREFVASISGMRIYTYYADSVKGRFTISRDDARNTVYLQMNSLKPEDTAVYYCNVVTIVSGRFDEYWGQGTQVTVSS

SEQ ID NO: 11371 - protein, 120 aa, synthetic construct
EVQLVESGGGLVQAGDSLRLSCTASGICEFILEMGWFRQAPGKEREFVASISGIREYTYYADSVKGRFTISRDDARNTVYLQMNSLKPEDTAVYYCNVTGLDVVMLNEYWGQGTQVTVSS

SEQ ID NO: 11372 - protein, 121 aa, synthetic construct
EVQLVESGGGLVQAGDSLRLSCTASGQSRVVLEMGWFRQAPGKEREFVASISGGVLYTYYADSVKGRFTISRDDARNTVYLQMNSLKPEDTAVYYCNVTLVDRKGRFLEYWGQGTQVTVSS

SEQ ID NO: 11373 - protein, 121 aa, synthetic construct
EVQLVESGGGLVQAGDSLRLSCTASGRDHMTIEMGWFRQAPGKEREFVASISGRHQGTYYADSVKGRFTISRDDARNTVYLQMNSLKPEDTAVYYCNVVRWGAERGFIEYWGQGTQVTVSS

SEQ ID NO: 11374 - protein, 119 aa, synthetic construct
EVQLVESGGGLVQAGDSLRLSCTASGCRIVFNVMGWFRQAPGKEREFVASISGFGGFTYYADSVKGRFTISRDDARNTVYLQMNSLKPEDTAVYYCNVEGLERVDNEYWGQGTQVTVSS

SEQ ID NO: 11375 - protein, 120 aa, synthetic construct
EVQLVESGGGLVQAGDSLRLSCTASGHGVKPLEMGWFRQAPGKEREFVASISGQREYTYYADSVKGRFTISRDDARNTVYLQMNSLKPEDTAVYYCNVVTVLINKFVEYWGQGTQVTVSS

SEQ ID NO: 11376 - protein, 123 aa, synthetic construct
EVQLVESGGGLVQAGDSLRLSCTASGVKGSVMEMGWFRQAPGKEREFVASISGMGMYTYYADSVKGRFTISRDDARNTVYLQMNSLKPEDTAVYYCNVTALFGLRVVKFLEYWGQGTQVTVSS

SEQ ID NO: 11377 - protein, 120 aa, synthetic construct
EVQLVESGGGLVQAGDSLRLSCTASGVDGRVMEMGWFRQAPGKEREFVASISGYGQYTYYADSVKGRFTISRDDARNTVYLQMNSLKPEDTAVYYCNVTWATQRGFIEYWGQGTQVTVSS

SEQ ID NO: 11378 - protein, 120 aa, synthetic construct
EVQLVESGGGLVQAGDSLRLSCTASGPIAVIMEMGWFRQAPGKEREFVASISGRDNCTYYADSVKGRFTISRDDARNTVYLQMNSLKPEDTAVYYCNVTSITELRFQEYWGQGTQVTVSS

SEQ ID NO: 11379 - protein, 121 aa, synthetic construct
EVQLVESGGGLVQAGDSLRLSCTASGVTPYIIEMGWFRQAPGKEREFVASISGKGTYTYYADSVKGRFTISRDDARNTVYLQMNSLKPEDTAVYYCNVVFWDMRVGLEEYWGQGTQVTVSS

SEQ ID NO: 11380 - protein, 121 aa, synthetic construct
EVQLVESGGGLVQAGDSLRLSCTASGVTGIVVEMGWFRQTPGKEREFVASISGGVAYTYYADSVKGRFTISRDDARNTVYLQMNSLKPEDTAVYYCNVVGLHADVGFLEYWGQGTQVTVSS

SEQ ID NO: 11381 - protein, 119 aa, synthetic construct
EVQLVESGGGLVQAGDSLRLSCTASGNMAVLVEMGWFRQAPGKEREFVASISGHGSYTYYADSVKGRFTISRDDARNTVYLQMNSLKPEDTAVYYCNVTVLQATFKEYWGQGTQVTVSS

SEQ ID NO: 11382 - protein, 119 aa, synthetic construct
EVQLVESGGGLVQAGDSLRLSCTASGNVNYLLEMGWFRQAPGKEREFVASISGFDVYTYYADSVKGRFTISRDDARNTVYLQMNSLKPEDTAVYYCNVTSWSGRFLEYWGQGTQVTVSS

SEQ ID NO: 11383 - protein, 120 aa, synthetic construct
EVQLVESGGGLVQAGDSLRLSCTASGGRIVFVGMGWFRQAPGKEREFVASISGFRLSTYYADSVKGRFTISRDDARNTVYLQMNSLKPEDTAVYYCNVGNEASDDEREYWGQGTQVTVSS

SEQ ID NO: 11384 - protein, 119 aa, synthetic construct
EVQLVESGGGLVQAGDSLRLSCTASGNAGEIVEMGWFRQAPGKEREFVASISRRIDYTYYADSVKGRFTISRDDARNTVYLQMNSLKPEDTAVYYCNVVALMHIFHEYWGQGTQVTVSS

SEQ ID NO: 11385 - protein, 120 aa, synthetic construct
EVQLVESGGGLVQAGDSLRLSCTASGTIEMMVRMGWFRQAPGKEREFVASISGSSWLTYYADSVKGRFTISRDDARNTVYLQMNSLKPEDTAVYYCNVVVFNVKNCGEYWGQGTQVTVSS

SEQ ID NO: 11386 - protein, 122 aa, synthetic construct
EVQLVESGGGLVQAGDSLRLSCTASGHIHQLLEMGWFRQAPGKEREFVASISGRYVSTYYADSVKGRFTISRDDARNTVYLQMNSLKPEDTAVYYCNVTEFLAKQGTFREYWGQGTQVTVSS

SEQ ID NO: 11387 - protein, 122 aa, synthetic construct
EVQLVESGGGLVQAGDSLRLSCTASGMPHVIIEMGWFRQAPGKEREFVASISGVGGMTYYADSVKGRFTISRDDARNTVYLQMNSLKPEDTAVYYCNVTSLDRVRIRFAEYWGQGTQVTVSS

SEQ ID NO: 11388 - protein, 120 aa, synthetic construct
EVQLVESGGGLVQAGDSLRLSCTASGDQQHCIEMGWFRQAPGKEREFVASISVQSVYTYYADSVKGRFTISRDDARNTVYLQMNSLKPEDTAVYYCNVSVFNGFVLLEYWGQGTQVTVSS

SEQ ID NO: 11389 - protein, 119 aa, synthetic construct
EVQLVESGGGLVQAGDSLRLSCTASGIADTVVEMGWFRQAPGKEREFVASISGAGMYTYYADSVKGRFTISRDDARNTVYLQMNSLKPEDTAVYYCNVTMLRNVFCEYWGQGTQVTVSS

SEQ ID NO: 11390 - protein, 119 aa, synthetic construct
EVQLVESGGGLVQAGDSLRLSCTASGNADRFVEMGWFRQAPGKEREFVASISTACVYTYYADSVKGRFTISRDDARNTVYLQMNSLKPEDTAVYYCNVTVLLGRFEEYWGQGTQVTVSS

SEQ ID NO: 11391 - protein, 120 aa, synthetic construct
EVQLVESGGGLVQAGDSLRLSCTASGRKDDMIEMGWFRQAPGKEREFVASISGLGIYTYYADSVKGRFTISRDDARNTVYLQMNSLKPEDTAVYYCNVSRVSSVGFHEYWGQGTQVTVSS

SEQ ID NO: 11392 - protein, 119 aa, synthetic construct
EVQLVESGGGLVQAGDSLRLSCTASGHRSNVLEMGWFRQAPGKEREFVASISGHNNYTYYADSVKGRFTISRDDARNTVYLQMNSLKPEDTAVYYCNVTTMVVGFREYWGQGTQVTVSS

SEQ ID NO: 11393 - protein, 117 aa, synthetic construct
EVQLVESGGGLVQAGDSLRLSCTASGLLDMVMEMGWFRQAPGKEREFVASISGVGMYTYYADSVKGRFTISRDDARNTVYLQMNSLKPEDTAVYYCNVLTYRILEYWGQGTQVTVSS

SEQ ID NO: 11394 - protein, 120 aa, synthetic construct
EVQLVESGGGLVQAGDSLRLSCTASGSLGGGLEMGWFRQAPGKEREFVASISMRQSYTYYADSVKGRFTISRDDARNTVYLQMNSLKPEDTAVYYCNVVRIVGRMIVEYWGQGTQVTVSS

SEQ ID NO: 11395 - protein, 120 aa, synthetic construct
EVQLVESGGGLVQAGDSLRLSCTASGNAEGFVEMGWFRQAPGKEREFVASISGMGVYTYYADSVKGRFTISRDDARNTVYLQMNSLKPEDTAVYYCNVTQLFAIQFMEYWGQGTQVTVSS

SEQ ID NO: 11396 - protein, 119 aa, synthetic construct
EVQLVESGGGLVQAGDSLRLSCTASGNIGAVVEMGWFRQAPGKEREFVASISGGLCYTYYADSVKGRFTISRDDARNTVYLQMNSLKPEDTAVYYCNVSILYTRFLEYWGQGTQVTVSS

SEQ ID NO: 11397 - protein, 119 aa, synthetic construct
EVQLVESGGGLVQAGDSLRLSCTASGYVERVVEMGWFRQAPGKEREFVASISGATAYTYYADSVKGRFTISRDDARNTVYLQMNSLKPEDTAVYYCNVTALARLVMEYWGQGTQVTVSS

SEQ ID NO: 11398 - protein, 123 aa, synthetic construct
EVQLVESGGGLVQAGDSLRLSCTASGHPGVLLEMGWFRQAPGKEREFVASISGDQITTYYADSVKGRFTISRDDARNTVYLQMNSLKPEDTAVYYCNVTRFELTPVPRFVEYWGQGTQVTVSS

SEQ ID NO: 11399 - protein, 120 aa, synthetic construct
EVQLVESGGGLVQAGDSLRLSCTASGVNDRVLGMGWFRQAPGKEREFVASISVPYSVTYYADSVKGRFTISRDDARNTVYLQMNSLKPEDTAVYYCNVTVYTMRMFIEYWGQGTQVTVSS

SEQ ID NO: 11400 - protein, 120 aa, synthetic construct
EVQLVESGGGLVQAGDSLRLSCTASGQLEIVVEMGWFRQAPGKEREFVASISRSGTYTYYADSVKGRFTISRDDARNTVYLQMNSLKPEDTAVYYCNVVTLGRFRFFEYWGQGTQVTVSS

SEQ ID NO: 11401 - protein, 122 aa, synthetic construct
EVQLVESGGGLVQAGDSLRLSCTASGKNALVLEMGWFRQAPGKEREFVASISGDGVYTYYADSVKGRFTISRDDARNTVYLQMNSLKPEDTAVYYCNVTIIDYHKMHFEEYWGQGTQVTVSS

SEQ ID NO: 11402 - protein, 117 aa, synthetic construct
EVQLVESGGGLVQAGDSLRLSCTASGGGIEMGWFRQAPGKEREFVASISSTLTYTYYADSVKGRFTISRDDARNTVYLQMNSLKPEDTAVYYCNVTSLVGHRFMEYWGQGTQVTVSS

SEQ ID NO: 11403 - protein, 120 aa, synthetic construct
EVQLVESGGGLVQAGDSLRLSCTASGDDAYEVHMGWFRQAPGKEREFVASISGRAHYTYYADSVKGRFTISRDDARNTVYLQMNSLKPEDTAVYYCNVLMFVPGSFKEYWGQGTQVTVSS

SEQ ID NO: 11404 - protein, 121 aa, synthetic construct
EVQLVESGGGLVQAGDSLRLSCTASGRGVRKIEMGWFRQAPGKEREFVASISCRIDYTYYADSVKGRFTISRDDARNTVYLQMNSLKPEDTAVYYCNVTVLETPVAFREYWGQGTQVTVSS

SEQ ID NO: 11405 - protein, 120 aa, synthetic construct
EVQLVESGGGLVQAGDSLRLSCTASGQKGIMLEMGWFRQAPGKEREFVASISGVGKRTYYADSVKGRFTISRDDARNTVYLQMNSLKPEDTAVYYCNVTAVVRSRFVEYWGQGTQVTVSS

SEQ ID NO: 11406 - protein, 120 aa, synthetic construct
EVQLVESGGGLVQAGDSLRLSCTASGRVSDGVEMGWFRQAPGKEREFVASISMRGVYTYYADSVKGRFTISRDDARNTVYLQMNSLKPEDTAVYYCNVTSFGRFGMREYWGQGTQVTVSS

SEQ ID NO: 11407 - protein, 119 aa, synthetic construct
EVQLVESGGGLVQAGDSLRLSCTASGTSGPVLEMGWFRQAPGKEREFVASISMDEHYTYYADSVKGRFTISRDDARNTVYLQMNSLKPEDTAVYYCNVTMLLRGFWEYWGQGTQVTVSS

SEQ ID NO: 11408 - protein, 121 aa, synthetic construct
EVQLVESGGGLVQAGDSLRLSCTASGWYGELWFMGWFRQAPGKEREFVASISTRHGVTYYADSVKGRFTISRDDARNTVYLQMNSLKPEDTAVYYCNVLAVDNLFNAGEYWGQGTQVTVSS

SEQ ID NO: 11409 - protein, 121 aa, synthetic construct
EVQLVESGGGLVQAGDSLRLSCTASGFMHVFLGMGWFRQAPGKEREFVASISGFHEATYYADSVKGRFTISRDDARNTVYLQMNSLKPEDTAVYYCNVLSWLDAVDRCEYWGQGTQVTVSS

SEQ ID NO: 11410 - protein, 120 aa, synthetic construct
EVQLVESGGGLVQAGDSLRLSCTASGMFGSFIEMGWFRQAPGKEREFVASISCKRAYTYYADSVKGRFTISRDDARNTVYLQMNSLKPEDTAVYYCNVVVWGATGFIEYWGQGTQVTVSS

SEQ ID NO: 11411 - protein, 119 aa, synthetic construct
EVQLVESGGGLVQAGDSLRLSCTASGAKGRVVEMGWFRQAPGKEREFVASISGFSQYTYYADSVKGRFTISRDDARNTVYLQMNSLKPEDTAVYYCNVTVIAGVFEEYWGQGTQVTVSS

SEQ ID NO: 11412 - protein, 120 aa, synthetic construct
EVQLVESGGGLVQAGDSLRLSCTASGPMHVTIEMGWFRQAPGKEREFVASISGSGNYTYYADSVKGRFTISRDDARNTVYLQMNSLKPEDTAVYYCNVVIFDTFSFFEYWGQGTQVTVSS

SEQ ID NO: 11413 - protein, 120 aa, synthetic construct
EVQLVESGGGLVQAGDSLRLSCTASGSMVHVVEMGWFRQAPGKEREFVASISGECDYTYYADSVKGRFTISRDDARNTVYLQMNSLKPEDTAVYYCNVCALRTQRFVEYWGQGTQVTVSS

SEQ ID NO: 11414 - protein, 120 aa, synthetic construct
EVQLVESGGGLVQAGDSLRLSCTASGVLGVTLEMGWFRQAPGKEREFVASISRANNETYYADSVKGRFTISRDDARNTVYLQMNSLKPEDTAVYYCNVTSISGGRFHEYWGQGTQVTVSS

SEQ ID NO: 11415 - protein, 120 aa, synthetic construct
EVQLVESGGGLVQAGDSLRLSCTASGEVFRVIEMGWFRQAPGKEREFVASISGIGTFTYYADSVKGRFTISRDDARNTVYLQMNSLKPEDTAVYYCNVVMFQEHRFAEYWGQGTQVTVSS

SEQ ID NO: 11416 - protein, 120 aa, synthetic construct
EVQLVESGGGLVQAGDSLRLSCTASGRNGSWIDMGWFRQAPGKEREFVASISGNSGYTYYADSVKGRFTISRDDARNTVYLQMNSLKPEDTAVYYCNFTVLGEVGFVEYWGQGTQVTVSS

SEQ ID NO: 11417 - protein, 121 aa, synthetic construct
EVQLVESGGGLVQAGDSLRLSCTASGVGAVEGQMGWFRQAPGKEREFVASISIPGSVTYYADSVKGRFTISRDDARNTVYLQMNSLKPEDTAVYYCNVLGFSVVRAFVEYWGQGTQVTVSS

SEQ ID NO: 11418 - protein, 121 aa, synthetic construct
EVQLVESGGGLVQAGDSLRLSCTASGHTGILMEMGWFRQAPGKEREFVASISSNRTYTYYADSVKGRFTISRDDARNTVYLQMNSLKPEDTAVYYCNVVVLRRNMTLGEYWGQGTQVTVSS

SEQ ID NO: 11419 - protein, 120 aa, synthetic construct
EVQLVESGGGLVQAGDSLRLSCTASGPTVNPIEMGWFRQAPGKEREFVASISRGSMYTYYADSVKGRFTISRDDARNTVYLQMNSLKPEDTAVYYCNVTLFGPDGKREYWGQGTQVTVSS

SEQ ID NO: 11420 - protein, 120 aa, synthetic construct
EVQLVESGGGLVQAGDSLRLSCTASGRTHMLMEMGWFRQAPGKEREFVASISTVRDYTYYADSVKGRFTISRDDARNTVYLQMNSLKPEDTAVYYCNVVTFTIEGKKEYWGQGTQVTVSS

SEQ ID NO: 11421 - protein, 122 aa, synthetic construct
EVQLVESGGGLVQAGDSLRLSCTASGKQHEVLEMGWFRQAPGKEREFVASISGIVIYTYYADSVKGRFTISRDDARNTVYLQMNSLKPEDTAVYYCNVVVFDKTQFQFLEYWGQGTQVTVSS

SEQ ID NO: 11422 - protein, 124 aa, synthetic construct
EVQLVESGGGLVQAGDSLRLSCTASGCDAGIVEMGWFRQAPGKEREFVASISGAGNFTYYADSVKGRFTISRDDARNTVYLQMNSLKPEDTAVYYCNVTCIVRVVNSVEFLEYWGQGTQVTVSS

SEQ ID NO: 11423 - protein, 124 aa, synthetic construct
EVQLVESGGGLVQAGDSLRLSCTASGAVAPPIEMGWFRQAPGKEREFVASISVTRDYTYYADSVKGRFTISRDDARNTVYLQMNSLKPEDTAVYYCNVTVYSVAGPWISFDEYWGQGTQVTVSS

SEQ ID NO: 11424 - protein, 120 aa, synthetic construct
EVQLVESGGGLVQAGDSLRLSCTASGCRNDTLEMGWFRQAPGKEREFVASISGRASYTYYADSVKGRFTISRDDARNTVYLQMNSLKPEDTAVYYCNVVLIFHGTFVEYWGQGTQVTVSS

SEQ ID NO: 11425 - protein, 117 aa, synthetic construct
EVQLVESGGGLVQAGDSLRLSCTASGGGIEMGWFRQAPGKEREFVASISSTFTYTYYADSVKGRFTISRDDARNTVYLQMNSLKPEDTAVYYCNVTSLVGHRFMEYWGQGTQVTVSS

SEQ ID NO: 11426 - protein, 124 aa, synthetic construct
EVQLVESGGGLVQAGDSLRLSCTASGVAGIGIEMGWFRQAPGKEREFVASISRSGAYTYYADSVKGRFTISRDDARNTVYLQMNSLKPEDTAVYYCNVTAIVVANNSVKISEYWGQGTQVTVSS

SEQ ID NO: 11427 - protein, 121 aa, synthetic construct
EVQLVESGGGLVQAGDSLRLSCTASGCLGQRMEMGWFRQAPGKEREFVASISVRDSITYYADSVKGRFTISRDDARNTVYLQMNSLKPEDTAVYYCNVTCLLNVWMVLEYWGQGTQVTVSS

SEQ ID NO: 11428 - protein, 121 aa, synthetic construct
EVQLVESGGGLVQAGDSLRLSCTASGSVGLVMEMGWFRQAPGKEREFVASISGITTYTYYADSVKGRFTISRDDARNTVYLQMNSLKPEDTAVYYCNVSSLDIGRMLREYWGQGTQVTVSS

SEQ ID NO: 11429 - protein, 119 aa, synthetic construct
EVQLVESGGGLVQAGDSLRLSCTASGEALVVVEMGWFRQAPGKEREFVASISGAGEYTYYADSVKGRFTISRDDARNTVYLQMNSLKPEDTAVYYCNVVTFRTRFLEYWGQGTQVTVSS

SEQ ID NO: 11430 - protein, 121 aa, synthetic construct
EVQLVESGGGLVQAGDSLRLSCTASGKCVDVWSMGWFRQAPGKEREFVASISGSANITYYADSVKGRFTISRDDARNTVYLQMNSLKPEDTAVYYCNVWGMTLKLLFVEYWGQGTQVTVSS

SEQ ID NO: 11431 - protein, 118 aa, synthetic construct
EVQLVESGGGLVQAGDSLRLSCTASGVMFVFRDMGWFRQAPGKEREFVASISGFRGVTYYADSVKGRFTISRDDARNTVYLQMNSLKPEDTAVYYCNVMRGNEREEYWGQGTQVTVSS

SEQ ID NO: 11432 - protein, 121 aa, synthetic construct
EVQLVESGGGLVQAGDSLRLSCTASGIVKGVIGMGWFRQAPGKEREFVASISWGRADTYYADSVKGRFTISRDDARNTVYLQMNSLKPEDTAVYYCNVTQVLASWGFFEYWGQGTQVTVSS

SEQ ID NO: 11433 - protein, 121 aa, synthetic construct
EVQLVESGGGLVQAGDSLRLSCTASGGIPHVVEMGWFRQAPGKEREFVASISGTLGYTYYADSVKGRFTISRDDARNTVYLQMNSLKPEDTAVYYCNVMSINAGRQFLEYWGQGTQVTVSS

SEQ ID NO: 11434 - protein, 125 aa, synthetic construct
EVQLVESGGGLVQAGDSLRLSCTASGAQGLMMEMGWFRQAPGKEREFVASISLRQGYTYTYYADSVKGRFTISRDDARNTVYLQMNSLKPEDTAVYYCNVTYVGQEGFGVFREYWGQGTQVTVSS

SEQ ID NO: 11435 - protein, 121 aa, synthetic construct
EVQLVESGGGLVQAGDSLRLSCTASGNMVLGDVMGWFRQAPGKEREFVASISDTVDDTYYADSVKGRFTISRDDARNTVYLQMNSLKPEDTAVYYCNVSIKRGTIVFGEYWGQGTQVTVSS

SEQ ID NO: 11436 - protein, 126 aa, synthetic construct
EVQLVESGGGLVQAGDSLRLSCTASGQVNMAVEMGWFRQAPGKEREFVASISSDGYRPYTYYADSVKGRFTISRDDARNTVYLQMNSLKPEDTAVYYCNVTAVIQNNVGIYIVEYWGQGTQVTVSS

SEQ ID NO: 11437 - protein, 118 aa, synthetic construct
EVQLVESGGGLVQAGDSLRLSCTASGIRFVFLIMGWFRQAPGKEREFVASISGYGGRTYYADSVKGRFTISRDDARNTVYLQMNSLKPEDTAVYYCNSAGWHVDCEYWGQGTQVTVSS

SEQ ID NO: 11438 - protein, 119 aa, synthetic construct
EVQLVESGGGLVQAGDSLRLSCTASGMYGLILEMGWFRQAPGKEREFVASISGLGLYTYYADSVKGRFTISRDDARNTVYLQMNSLKPEDTAVYYCNVSILAVRLREYWGQGTQVTVSS

SEQ ID NO: 11439 - protein, 122 aa, synthetic construct
EVQLVESGGGLVQAGDSLRLSCTASGLFGNVVEMGWFRQAPGKEREFVASISGNYEYTYYADSVKGRFTISRDDARNTVYLQMNSLKPEDTAVYYCNVTVMHMRTVGWMEYWGQGTQVTVSS

SEQ ID NO: 11440 - protein, 119 aa, synthetic construct
EVQLVESGGGLVQAGDSLRLSCTASGELSRDLFMGWFRQAPGKEREFVASIVVKRYTYYADSVKGRFTISRDDARNTVYLQMNSLKPEDTAVYYCNVVIGGSPVWTEYWGQGTQVTVSS

SEQ ID NO: 11441 - protein, 120 aa, synthetic construct
EVQLVESGGGLVQAGDSLRLSCTASGSRLRTIEMGWFRQAPGKEREFVASISARNPYTYYADSVKGRFTISRDDARNTVYLQMNSLKPEDTAVYYCNVVLMHPRGFLEYWGQGTQVTVSS

SEQ ID NO: 11442 - protein, 123 aa, synthetic construct
EVQLVESGGGLVQAGDSLRLSCTASGARRFVLEMGWFRQAPGKEREFVASISGGGLYTYYADSVKGRFTISRDDARNTVYLQMNSLKPEDTAVYYCNVTCVTDERNCMVLEYWGQGTQVTVSS

SEQ ID NO: 11443 - protein, 121 aa, synthetic construct
EVQLVESGGGLVQAGDSLRLSCTASGPDMGFIEMGWFRQAPGKEREFVASISGIHLYTYYADSVKGRFTISRDDARNTVYLQMNSLKPEDTAVYYCNVTQLNENMRLVEYWGQGTQVTVSS

SEQ ID NO: 11444 - protein, 119 aa, synthetic construct
EVQLVESGGGLVQAGDSLRLSCTASGIYSGGIEMGWFRQAPGKEREFVASISMFSWYTYYADSVKGRFTISRDDARNTVYLQMNSLKPEDTAVYYCNVTILASIFLEYWGQGTQVTVSS

SEQ ID NO: 11445 - protein, 121 aa, synthetic construct
EVQLVESGGGLVQAGDSLRLSCTASGRINRLMEMGWFRQAPGKEREFVASISDRRLYTYYADSVKGRFTISRDDARNTVYLQMNSLKPEDTAVYYCNVVSITFVGRFIEYWGQGTQVTVSS

SEQ ID NO: 11446 - protein, 120 aa, synthetic construct
EVQLVESGGGLVQAGDSLRLSCTASGHSAGVVEMGWFRQAPGKEREFVASISGMSLYTYYADSVKGRFTISRDDARNTVYLQMNSLKPEDTAVYYCNVVTFAENGMSEYWGQGTQVTVSS

SEQ ID NO: 11447 - protein, 120 aa, synthetic construct
EVQLVESGGGLVQAGDSLRLSCTASGVLPWVLGMGWFRQAPGKEREFVASISVDHYVTYYADSVKGRFTISRDDARNTVYLQMNSLKPEDTAVYYCNVTVVLTNGFHEYWGQGTQVTVSS

SEQ ID NO: 11448 - protein, 122 aa, synthetic construct
EVQLVESGGGLVQAGDSLRLSCTASGIRGNILEMGWFRQAPGKEREFVASISIQELYTYYADSVKGRFTISRDDARNTVYLQMNSLKPEDTAVYYCNVTVFRMGVVGFWEYWGQGTQVTVSS

SEQ ID NO: 11449 - protein, 120 aa, synthetic construct
EVQLVESGGGLVQAGDSLRLSCTASGEGVVVVEMGWFRQAPGKEREFVASISKVGVFTYYADSVKGRFTISRDDARNTVYLQMNSLKPEDTAVYYCNVTGVHVIGFTEYWGQGTQVTVSS

SEQ ID NO: 11450 - protein, 125 aa, synthetic construct
EVQLVESGGGLVQAGDSLRLSCTASGLDYNVLEMGWFRQAPGKEREFVASISSVARYTYYADSVKGRFTISRDDARNTVYLQMNSLKPEDTAVYYCNVMGYGLDAVGTVHVKEYWGQGTQVTVSS

SEQ ID NO: 11451 - protein, 120 aa, synthetic construct
EVQLVESGGGLVQAGDSLRLSCTASVVKAHVLEMGWFRQAPGKEREFVASISGMTVYTYYADSVKGRFTISRDDARNTVYLQMNSLKPEDTAVYYCNVTVFVGPQLVEYWGQGTQVTVSS

SEQ ID NO: 11452 - protein, 120 aa, synthetic construct
EVQLVESGGGLVQAGDSLRLSCTASGWKGRLMEMGWFRQAPGKEREFVASISDGSHSTYYADSVKGRFTISRDDARNTVYLQMNSLKPEDTAVYYCNVTVFTLSGFGEYWGQGTQVTVSS

SEQ ID NO: 11453 - protein, 118 aa, synthetic construct
EVQLVESGGGLVQAGDSLRLSCTASGRRIVFREMGWFRQAPGKEREFVASISGFWENTYYADSVKGRFTISRDDARNTVYLQMNSLKPEDTAVYYCNVLDVNDNMEYWGQGTQVTVSS

SEQ ID NO: 11454 - protein, 120 aa, synthetic construct
EVQLVESGGGLVQAGDSLRLSCTASGSVDVGIEMGWFRQAPGKEREFVASISGVMEYTYYADSVKGRFTISRDDARNTVYLQMNSLKPEDTAVYYCNVVYANKIGFFEYWGQGTQVTVSS

SEQ ID NO: 11455 - protein, 114 aa, synthetic construct
EVQLVESGGGLVQAGDSLRLSCTASGRIMDRMFMGWFRQAPGKEREFVAVSVGGRTTYYADSVKGRFTISRDDARNTVYLQMNSLKPEDTAVYYCNVMGLGEYWGQGTQVTVSS

SEQ ID NO: 11456 - protein, 120 aa, synthetic construct
EVQLVESGGGLVQAGDSLRLSCTASGMPHEAIEMGWFRQAPGKEREFVASISAHRHVTYYADSVKGRFTISRDDARNTVYLQMNSLKPEDTAVYYCNVTTRHVMGFNEYWGQGTQVTVSS

SEQ ID NO: 11457 - protein, 121 aa, synthetic construct
EVQLVESGGGLVQAGDSLRLSCTASGVNAVLLEMGWFRQAPGKEREFVASISINSGFTYYADSVKGRFTISRDDARNTVYLQMNSLKPEDTAVYYCNVTVWKRGVGFGEYWGQGTQVTVSS

SEQ ID NO: 11458 - protein, 119 aa, synthetic construct
EVQLVESGGGLVQAGDSLRLSCTASGTLGVTIEMGWFRQAPGKEREFVASISTNHGDTYYADSVKGRFTISRDDARNTVYLQMNSLKPEDTAVYYCNVTAHYHIFIEYWGQGTQVTVSS

SEQ ID NO: 11459 - protein, 121 aa, synthetic construct
EVQLVESGGGLVQAGDSLRLSCTASGRRVVWLEMGWFRQAPGKEREFVASISQGEGRTYYADSVKGRFTISRDDARNTVYLQMNSLKPEDTAVYYCNVTVFTTSEGFVEYWGQGTQVTVSS

SEQ ID NO: 11460 - protein, 121 aa, synthetic construct
EVQLVESGGGLVQAGDSLRLSCTASGKDRYLVEMGWFRQAPGKEREFVASISGGKAYTYYADSVKGRFTISRDDARNTVYLQMNSLKPEDTAVYYCNVTVLDTDMVFTEYWGQGTQVTVSS

SEQ ID NO: 11461 - protein, 125 aa, synthetic construct
EVQLVESGGGLVQAGDSLRLSCTASGSRIVFLPMGWFRQAPGKEREFVASISGFGHDTYYADSVKGRFTISRDDARNTVYLQMNSLKPEDTAVYYCNVGKEDHNGADGNRCREYWGQGTQVTVSS

SEQ ID NO: 11462 - protein, 121 aa, synthetic construct
EVQLVESGGGLVQAGDSLRLSCTASGRLDRMLEMGWFRQAPGKEREFVASISVRLAYTYYADSVKGRFTISRDDARNTVYLQMNSLKPEDTAVYYCNVTRVLGDGRFVEYWGQGTQVTVSS

SEQ ID NO: 11463 - protein, 121 aa, synthetic construct
EVQLVESGGGLVQAGDSLRLSCTASGLSSHCLEMGWFRQAPGKEREFVASISMGRQYTYYADSVKGRFTISRDDARNTVYLQMNSLKPEDTAVYYCNVTALTRGGVKCEYWGQGTQVTVSS

SEQ ID NO: 11464 - protein, 120 aa, synthetic construct
EVQLVESGGGLVQAGDSLRLSCTASGHADQCVEMGWFRQAPGKEREFVASISGRGMCTYYADSVKGRFTISRDDARNTVYLQMNSLKPEDTAVYYCNVTVLGQGLFLEYWGQGTQVTVSS

SEQ ID NO: 11465 - protein, 120 aa, synthetic construct
EVQLVESGGGLVQAGDSLRLSCTASGRLLRLIEMGWFRQAPGKEREFVASISDLNEGTYYADSVKGRFTISRDDARNTVYLQMNSLKPEDTAVYYCNVTMVTSDGFKEYWGQGTQVTVSS

SEQ ID NO: 11466 - protein, 117 aa, synthetic construct
EVQLVESGGGLVQAGDSLRLSCTASGSTPGFMEMGWFRQAPGKEREFVASISRVHDYTYYADSVKGRFTISRDDARNTVYLQMNSLKPEDTAVYYCNVFTVLLREYWGQGTQVTVSS

SEQ ID NO: 11467 - protein, 120 aa, synthetic construct
EVQLVESGGGLVQAGDSLRLSCTASGKTQGLIEMGWFRQAPGKEREFVASISYKGSRTYYADSVKGRFTISRDDARNTVYLQMNSLKPEDTAVYYCNVTRYIDVCFIEYWGQGTQVTVSS

SEQ ID NO: 11468 - protein, 118 aa, synthetic construct
EVQLVESGGGLVQAGDSLRLSCTASGEKELVGYMGWFRQAPGKEREFVASISTGTDRTYYADSVKGRFTISRDDARNTVYLQMNSLKPEDTAVYYCNVLDVVVWREYWGQGTQVTVSS

SEQ ID NO: 11469 - protein, 120 aa, synthetic construct
EVQLVESGGGLVQAGDSLRLSCTASGTDGAIDMGWFRQAPGKEREFVASISVHGAVTYYADSVKGRFTISRDDARNTVYLQMNSLKPEDTAVYYCNVTVVIPGYMFVEYWGQGTQVTVSS

SEQ ID NO: 11470 - protein, 120 aa, synthetic construct
EVQLVESGGGLVQAGDSLRLSCTASGMGTRALEMGWFRQAPGKEREFVASISENRDYTYYADSVKGRFTISRDDARNTVYLQMNSLKPEDTAVYYCNVSMFMNRGFAEYWGQGTQVTVSS

SEQ ID NO: 11471 - protein, 119 aa, synthetic construct
EVQLVESGGGLVQAGDSLRLSCTASGDVQGLVEMGWFRQAPGKEREFVASISRADIYTYYADSVKGRFTISRDDARNTVYLQMNSLKPEDTAVYYCNVTVAVRRFMEYWGQGTQVTVSS

SEQ ID NO: 11472 - protein, 123 aa, synthetic construct
EVQLVESGGGLVQAGDSLRLSCTASGPVGAMVEMGWFRQAPGKEREFVASISGWDDYTYYADSVKGRFTISRDDARNTVYLQMNSLKPEDTAVYYCNVVLRPTVSRPQFMEYWGQGTQVTVSS

SEQ ID NO: 11473 - protein, 120 aa, synthetic construct
EVQLVESGGGLVQAGDSLRLSCTASGRRFNILEMGWFRQAPGKEREFVASISGAEWYTYYADSVKGRFTISRDDARNTVYLQMNSLKPEDTAVYYCNVVQLFGGKFIEYWGQGTQVTVSS

SEQ ID NO: 11474 - protein, 117 aa, synthetic construct
EVQLVESGGGLVQAGDSLRLSCTASGGRIVFLPMGWFRQAPGKEREFVASISGIRVATYYADSVKGRFTISRDDARNTVYLQMNSLKPEDTAVYYCNVISEGNREYWGQGTQVTVSS

SEQ ID NO: 11475 - protein, 120 aa, synthetic construct
EVQLVESGGGLVQAGDSLRLSCTASGDSKLAIEMGWFRQAPGKEREFVASISVRREATYYADSVKGRFTISRDDARNTVYLQMNSLKPEDTAVYYCNVWICDVAGFREYWGQGTQVTVSS

SEQ ID NO: 11476 - protein, 120 aa, synthetic construct
EVQLVESGGGLVQAGDSLRLSCTASGRRDDGIEMGWFRQAPGKEREFVASISVINMWTYYADSVKGRFTISRDDARNTVYLQMNSLKPEDTAVYYCNVTILDVARFVEYWGQGTQVTVSS

SEQ ID NO: 11477 - protein, 120 aa, synthetic construct
EVQLVESGGGLVQAGDSLRLSCTASGCRAIILAMGWFRQAPGKEREFVADIGRPSVTYYADSVKGRFTISRDDARNTVYLQMNSLKPEDTAVYYCNVTGIREDGGKAEYWGQGTQVTVSS

SEQ ID NO: 11478 - protein, 117 aa, synthetic construct
EVQLVESGGGLVQAGDSLRLSCTASGGTSRTIFMGWFRQAPGKEREFVASHVFARTYYADSVKGRFTISRDDARNTVYLQMNSLKPEDTAVYYCNVIAAGDMWMEYWGQGTQVTVSS

SEQ ID NO: 11479 - protein, 121 aa, synthetic construct
EVQLVESGGGLVQAGDSLRLSCTASDGNPSYIEMGWFRQAPGKEREFVASISVVGNWTYYADSVKGRFTISRDDARNTVYLQMNSLKPEDTAVYYCNVTGLFGLIVKEEYWGQGTQVTVSS

SEQ ID NO: 11480 - protein, 122 aa, synthetic construct
EVQLVESGGGLVQAGDSLRLSCTASGIGRKGLEMGWFRQAPGKEREFVASISVQLLYTYYADSVKGRFTISRDDARNTVYLQMNSLKPEDTAVYYCNVTELVVDRRMFIEYWGQGTQVTVSS

SEQ ID NO: 11481 - protein, 124 aa, synthetic construct
EVQLVESGGGLVQAGDSLRLSCTASGGLVVFKRMGWFRQAPGKEREFVASISGFRTETYYADSVKGRFTISRDDARNTVYLQMNSLKPEDTAVYYCNVISAVGDFQIWDMMEYWGQGTQVTVSS

SEQ ID NO: 11482 - protein, 120 aa, synthetic construct
EVQLVESGGGLVQAGDSLRLSCTASGLRIVFIRMVWFRQAPGKEREFVASISGFGQETYYADSVKGRFTISRDDARNTVYLQMNSLKPEDTAVYYCNVGQDCIADVSEYWGQGTQVTVSS

SEQ ID NO: 11483 - protein, 120 aa, synthetic construct
EVQLVESGGGLVQAGDSLRLSCTASGVIAVCGQMGWFRQAPGKEREFVASISWPVTRTYYADSVKGRFTISRDDARNTVYLQMNSLKPEDTAVYYCNVLVLNAYTMVEYWGQGTQVTVSS

SEQ ID NO: 11484 - protein, 121 aa, synthetic construct
EVQLVESGGGLVQAGDSLRLSCTASGRGDGMIEMGWFRQAPGKEREFVASISENSNATYYADSVKGRFTISRDDARNTVYLQMNSLKPEDTAVYYCRSSVFHAGMGVAEYWGQGTQVTVSS

SEQ ID NO: 11485 - protein, 120 aa, synthetic construct
EVQLVESGGGLVQAGDSLRLSCTASGAGFNVLEMGWFRQAPGKEREFVASISGTRALTYYADSVKGRFTISRDDARNTVYLQMNSLKPEDTAVYYCNVTCWDGGAFLEYWGQGTQVTVSS

SEQ ID NO: 11486 - protein, 122 aa, synthetic construct
EVQLVESGGGLVQAGDSLRLSCTASGFRGVLWHMGWFRQAPGKEREFVASISGESNVTYYADSVKGRFTISRDDARNTVYLQMNSLKPEDTAVYYCNVWGVTDIRMLFGEYWGQGTQVTVSS

SEQ ID NO: 11487 - protein, 122 aa, synthetic construct
EVQLVESGGGLVQAGDSLRLSCTASGSLRSLIEMGWFRQAPGKEREFVASISISGLYTYYADSVKGRFTISRDDARNTVYLQMNSLKPEDTAVYYCNVVRFDPSVVEFEEYWGQGTQVTVSS

SEQ ID NO: 11488 - protein, 123 aa, synthetic construct
EVQLVESGGGLVQAGDSLRLSCTASGTEHQVVEMGWFRQAPGKEREFVASISGLTMGTYYADSVKGRFTISRDDARNTVYLQMNSLKPEDTAVYYCNFTIFRAAGLHFFWEYWGQGTQVTVSS

SEQ ID NO: 11489 - protein, 122 aa, synthetic construct
EVQLVESGGGLVQAGDSLRLSCTASGTHLLIWFMGWFRQAPGKEREFVASISGINRGTYYADSVKGRFTISRDDARNTVYLQMNSLKPEDTAVYYCNVWGVDSMSGGFGEYWGQGTQVTVSS

SEQ ID NO: 11490 - protein, 120 aa, synthetic construct
EVQLVESGGGLVQAGDSLRLSCTASGMPGSVLEMGWFRQAPGKEREFVASISESAGYTYYADSVKGRFTISRDDARNTVYLQMNSLKPEDTAVYYCNVSTILDSMFMEYWGQGTQVTVSS

SEQ ID NO: 11491 - protein, 120 aa, synthetic construct
EVQLVESGGGLVQAGDSLRLSCTASGTLKYVFEMGWFRQAPGKEREFVASISNVTAYTYYADSVKGRFTISRDDARNTVYLQMNSLKPEDTAVYYCNVSAITSMGKVEYWGQGTQVTVSS

SEQ ID NO: 11492 - protein, 120 aa, synthetic construct
EVQLVESGGGLVQAGDSLRLSCTASGIGKGFGVMGWFRQAPGKEREFVASISLMHSVTYYADSVKGRFTISRDDARNTVYLQMNSLKPEDTAVYYCNVHIITGVGSSEYWGQGTQVTVSS

SEQ ID NO: 11493 - protein, 120 aa, synthetic construct
EVQLVESGGGLVQAGDSLRLSCTASGANDRALEMGWFRQAPGKEREFVASISVWYGCTYYADSVKGRFTISRDDARNTVYLQMNSLKPEDTAVYYCNVTMVNQQCFLEYWGQGTQVTVSS

SEQ ID NO: 11494 - protein, 122 aa, synthetic construct
EVQLVESGGGLVQAGDSLRLSCTASGNDMGIIEMGWFRQAPGKEREFVASISCTRDYTYYADSVKGRFTISRDDARNTVYLQMNSLKPEDTAVYYCNVSTVNRSSARFEEYWGQGTQVTVSS

SEQ ID NO: 11495 - protein, 119 aa, synthetic construct
EVQLVESGGGLVQAGDSLRLSCTASGGRMSILEMGWFRQAPGKEREFVASISVRAGYTYYADSVKGRFTISRDDARNTVYLQMNSLKPEDTAVYYCNVVTWEKCFLEYWGQGTQVTVSS

SEQ ID NO: 11496 - protein, 120 aa, synthetic construct
EVQLVESGGGLVQAGDSLRLSCTASGRVLHVVEMGWFRQAPGKEREFVASISGRDEYTYYADSVKGRFTISRDDARNTVYLQMNSLKPEDTAVYYCNVTCLGVDAWVEYWGQGTQVTVSS

SEQ ID NO: 11497 - protein, 124 aa, synthetic construct
EVQLVESGGGLVQAGDSLRLSCTASGMRIVFLGMGWFRQAPGKEREFVASISEDWVRTYYADSVKGRFTISRDDARNTVYLQMNSLKPEDTAVYYCNVFTGGWVSLAVSLYEYWGQGTQVTVSS

SEQ ID NO: 11498 - protein, 122 aa, synthetic construct
EVQLVESGGGLVQAGDSLRLSCTASGQRIVFVNMGWFRQAPGKEREFVASISWKHVDTYYADSVKGRFTISRDDARNTVYLQMNSLKPEDTAVYYCNLSGGGVVQVVSAEYWGQGTQVTVSS

SEQ ID NO: 11499 - protein, 121 aa, synthetic construct
EVQLVESGGGLVQAGDSLRLSCTASGKSAKCLEMGWFRQAPGKEREFVASISCRVDYTYYADSVKGRFTISRDDARNTVYLQMNSLKPEDTAVYYCNVTKFKRKNGFTEYWGQGTQVTVSS

SEQ ID NO: 11500 - protein, 117 aa, synthetic construct
EVQLVESGGGLVQAGDSLRLSCTASGQSPGILEMGWFRQAPGKEREFVASISWIRRYTYYADSVKGRFTISRDDARNTVYLQMNSLKPEDTAVYYCNVTTVRFTEYWGQGTQVTVSS

SEQ ID NO: 11501 - protein, 120 aa, synthetic construct
EVQLVESGGGLVQAGDSLRLSCTASGYNGHAIEMGWFRQAPGKEREFVASISSTVLYTYYADSVKGRFTISRDDARNTVYLQMNSLKPEDTAVYYCNISVIVKRGIDEYWGQGTQVTVSS

SEQ ID NO: 11502 - protein, 120 aa, synthetic construct
EVQLVESGGGLVQAGDSLRLSCTASGSNNRCVEMGWFRQAPGKEREFVASISGDGWYTYYADSVKGRFTISRDDARNTVYLQMNSLKPEDTAVYYCNVSVLEMGRVVEYWGQGTQVTVSS

SEQ ID NO: 11503 - protein, 120 aa, synthetic construct
EVQLVESGGGLVQAGDSLRLSCTASGDRVDMLEMSWFRQAPGKEREFVASISVAHLLTYYADSVKGRFTISRDDARNTVYLQMNSLKPEDTAVYYCNVSVFFVDRFSEYWGQGTQVTVSS

SEQ ID NO: 11504 - protein, 118 aa, synthetic construct
EVQLVESGGGLVQAGDSLRLSCTASGSPNNMMEMGWFRQAPGKERKFVASISVPVGLTYYADSVKGRFTISRDDARNTVYLQMNSLKPEDTAVYYCNVLTRRSLREYWGQGTQVTVSS

SEQ ID NO: 11505 - protein, 119 aa, synthetic construct
EVQLVESGGGLVQAGDSLRLSCTASGRLHAWIEMGWFRQAPGKEREFVASISGATGGTYYADSVKGRFTISRDDARNTVYLQMNSLKPEDTAVYYCNVTTFAQLKAEYWGQGTQVTVSS

SEQ ID NO: 11506 - protein, 119 aa, synthetic construct
EVQLVESGGGLVQAGDSLRLSCTASGRSWLEMGWFRQAPGKEREFVASISGIGAYTYYADSVKGRFTISRDDARNTVYLQMNSLKPEDTAVYYCNVSLLNSRIGRTEYWGQGTQVTVSS

SEQ ID NO: 11507 - protein, 122 aa, synthetic construct
EVQLVESGGGLVQAGDSLRLSCTASGVGYCLVEMGWFRQAPGKEREFVASISGNTSYTYYADSVKGRFTISRDDARNTVYLQMNSLKPEDTAVYYCNVIEFWVTARMFLEYWGQGTQVIVSS

SEQ ID NO: 11508 - protein, 120 aa, synthetic construct
EVQLVESGGGLVQAGDSLRLSCTASGDGSCIIEMGWFRQAPGKEREFVASISGIGGCTYYADSVKGRFTISRDDARNTVYLQMNSLKPEDTAVYYCNVTSVTCNGFIEYWGQGTQVTVSS

SEQ ID NO: 11509 - protein, 122 aa, synthetic construct
EVQLVESGGGLVQAGDSLRLSCTASGVTDTVSHMGWFRQAPGKEREFVASISVIGLVTYYADSVKGRFTISRDDARNTVYLQMNSLKPEDTAVYYCNVVRITFNPMVFHEYWGQGTQVTVSS

SEQ ID NO: 11510 - protein, 123 aa, synthetic construct
EVQLVESGGGLVQAGDSLRLSCTASGLLCSALEMGWFRQAPGKEREFVASISVRHGATYYADSVKGRFTISRDDARNTVYLQMNSLKPEDTAVYYCNVTGLTSVGVSVFVEYWGQGTQVTVSS

SEQ ID NO: 11511 - protein, 122 aa, synthetic construct
EVQLVESGGGLVQAGDSLRLSCTASGWLMGIGSMGWFRQAPGKEREFVASISDGPVHTYYADSVKGRFTISRDDARNTVYLQMNSLKPEDTAVYYCNVNSDFIRINFCGEYWGQGTQVTVSS

SEQ ID NO: 11512 - protein, 120 aa, synthetic construct
EVQLVESGGGLVQAGDSLRLSCTASGPAEELMEMGWFRQAPGKEREFVASISWRRLYTYYADSVKGRFTISRDDARNTVYLQMNSLKPEDTAVYYCNVTTIGCFGKREYWGQGTQVTVSS

SEQ ID NO: 11513 - protein, 121 aa, synthetic construct
EVQLVESGGGLVQAGDSLRLSCTASGILSRGMEMGWFRQAPGKEREFVASISLANDYTYYADSVKGRFTISRDDARNTVYLQMNSLKPEDTAVYYCNVVIFTALMLFIEYWGQGTQVTVSS

SEQ ID NO: 11514 - protein, 120 aa, synthetic construct
EVQLVESGGGLVQAGDSLRLSCTASGKVHQAIEMGWFRQAPGKEREFVASISGVTMWTYYADSVKGRFTISRDDARNTVYLQMNSLKPEDTAVYYCNVTVLALGMFGEYWGQGTQVTVSS

SEQ ID NO: 11515 - protein, 119 aa, synthetic construct
EVQLVESGGGLVQAGDSLRLSCTASGLGSSRTVMGWFRQAPGKEREFVASISYMLGSTYYADSVKGRFTISRDDARNTVYLQMNSLKPEDTAVYYCNVLMFGLRFEEYWGQGTQVTVSS

SEQ ID NO: 11516 - protein, 120 aa, synthetic construct
EVQLVESGGGLVQAGDSLRLSCTASGRHHGVVEMGWFRQAPGKEREFVASISGRGICTYYADSVKGRFTISRDDARNTVYLQMNSLKPEDTAVYYCNVTVFANGGFQEYWGQGTQVTVSS

SEQ ID NO: 11517 - protein, 120 aa, synthetic construct
EVQLVESGGGLVQAGDSLRLSCTASGSCGRNQMGWFRQAPGKEREFVASISRYRFRTYYADSVKGRFTISRDDARNTVYLQMNSLKPEDTAVYYCNVRIVRARTLFGEYWGQGTQVTVSS

SEQ ID NO: 11518 - protein, 117 aa, synthetic construct
EVQLVESGGGLVQAGDSLRLSCTASGYSHDVIEMGWFRQAPGKEREFVASISRSCLYTYYADSVKGRFTISRDDARNTVYLQMNSLKPEDTAVYYCNVTAVGFVEYWGQGTQVTVSS

SEQ ID NO: 11519 - protein, 121 aa, synthetic construct
EVQLVESGGGLVQAGDSLRLSCTASGEIHLFLDMGWFRQAPGKEREFVASISNTGLYTYYADSVKGRFTISRDDARNTVYLQMNSLKPEDTAVYYCNVTHVVAHVGFREYWGQGTQVTVSS

SEQ ID NO: 11520 - protein, 122 aa, synthetic construct
EVQLVESGGGLVQAGDSLRLSCTASGLGGTVIEMGWFRQAPGKEREFVASISGLVDYTYYADSVKGRFTISRDDARNTVYLQMNSLKPEDTAVYYCNVTAVNVRQHNMVEYWGQGTQVTVSS

SEQ ID NO: 11521 - protein, 118 aa, synthetic construct
EVQLVESGGGLVQAGDSLRLSCTASGEYSARVWMGWFRQAPGKEREFVASTMLRQTYYADSVKGRFTISRDDARNTVYLQMNSLKPEDTAVYYCNVLAVGVGKWAEYWGQGTQVTVSS

SEQ ID NO: 11522 - protein, 120 aa, synthetic construct
EVQLVESGGGLVQAGDSLRLSCTASGRGLGIIEMGWFRQAPGKEREFVASISVRRMYTYYADSVKGRFTISRDDARNTVYLQMNSLKPEDTAVYYCNVVTVGTGGFLEYWGQGTQVTVSS

SEQ ID NO: 11523 - protein, 118 aa, synthetic construct
EVQLVESGGGLVQAGDSLRLSCTASGVAMMEMGWFRQAPGKEREFVASISMASEYTYYADSVKGRFTISRDDARNTVYLQMNSLKPEDTAVYYCNVTVFKFPEMVEYWGQGTQVTVSS

SEQ ID NO: 11524 - protein, 125 aa, synthetic construct
EVQLVESGGGLVQAGDSLRLSCTASGRHSLIIEMGWFRQAPGKEREFVASISENGHYTYYADSVKGRFTISRDDARNTVYLQMNSLKPEDTAVYYCNVTAMGVVSGLSQLFVEYWGQGTQVTVSS

SEQ ID NO: 11525 - protein, 121 aa, synthetic construct
EVQLVESGGGLVQAGDSLRLSCTASGMKGLVIEMGWFRQAPGKEREFVASISGLTDATYYADSVKGRFTISRDDARNTVYLQMNSLKPEDTAVYYCNVTAWGHVMLFGEYWGQGTQVTVSS

SEQ ID NO: 11526 - protein, 120 aa, synthetic construct
EVQLVESGGGLVQAGDSLRLSCTASGIEVRPLEMGWFRQAPGKEREFVASISWESVYTYYADSVKGRFTISRDDARNTVYLQMNSLKPEDTAVYYCNVWVVSAGMFVEYWGQGTQVTVSS

SEQ ID NO: 11527 - protein, 120 aa, synthetic construct
EVQLVESGGGLVQAGDSLRLSCTASGEAANMLEMGWFRQAPGKEREFVASISEKNGYTYYADSVKGRFTISRDDARNTVYLQMNSLKPEDTAVYYCNVLWVGISLVREYWGQGTQVTVSS

SEQ ID NO: 11528 - protein, 120 aa, synthetic construct
EVQLVESGGGLVQAGDSLRLSCTASGALNNLLEMGWFRQAPGKEREFVASISRRSWDTYYADSVKGRFTISRDDARNTVYLQMNSLKPEDTAVYYCNVTVVAFPWFVEYWGQGTQVTVSS

SEQ ID NO: 11529 - protein, 120 aa, synthetic construct
EVQLVESGGGLVQAGDSLRLSCTASGRDSGFVEMGWFRQAPGKEREFVASISRDGSYTYYADSVKGRFTISRDDARNTVYLQMNSLKPEDTAVYYCNVVILRDGMFDEYWGQGTQVTVSS

SEQ ID NO: 11530 - protein, 123 aa, synthetic construct
EVQLVESGGGLVQAGDSLRLSCTASGRTAKAIEMGWFRQAPGKEREFVASISCGTNYTYYADSVKGRFTISRDDARNTVYLQMNSLKPEDTAVYYCNVTVLVILQIVRIDEYWGQGTQVTVSS

SEQ ID NO: 11531 - protein, 121 aa, synthetic construct
EVQLVESGGGLVQAGDSLRLSCTASGLQGRLMEMGWFRQAPGKEREFVASISIFRGSTYYADSVKGRFTISRDDARNTVYLQMNSLKPEDTAVYYCNVTVLAGRMGFVEYWGQGTQVTVSS

SEQ ID NO: 11532 - protein, 120 aa, synthetic construct
EVQLVESGGGLVQAGDSLRLSCTASGGMGELLEMGWFRQAPGKEREFVASISMGDVYTYYADSVKGRFTISRDDARNTVYLQMNSLKPEDTAVYYCNVWSVINAAFHEYWGQGTQVTVSS

SEQ ID NO: 11533 - protein, 122 aa, synthetic construct
EVQLVESGGGLVQAGDSLRLSCTASGMDGSVVEMGWFRQAPGKEREFVASISGSVQYTYYADSVKGRFTISRDDARNTVYLQMNSLKPEDTAVYYCNVCSMLVGLCRFIEYWGQGTQVTVSS

SEQ ID NO: 11534 - protein, 122 aa, synthetic construct
EVQLVESGGGLVQAGDSLRLSCTASGFWGIVLEMGWFRQAPGKEREFVASISGVSMYTYYADSVKGRFTISRDDARNTVYLQMNSLKPEDTAVYYCNVVVIKRIPHGFVEYWGQGTQVTVSS

SEQ ID NO: 11535 - protein, 120 aa, synthetic construct
EVQLVESGGGLVQAGDSLRLSCTASGWTIPALEMGWFRQAPGKEREFVASISGKSWGTYYADSVKGRFTISRDDARNTVYLQMNSLKPEDTAVYYCNVVVFSGHVFMEYWGQGTQVTVSS

SEQ ID NO: 11536 - protein, 120 aa, synthetic construct
EVQLVESGGGLVQAGDSLRLSCTASGLVYNVLEMGWFRQAPGKEREFVASISGLGHYTYYADSVKGRFTISRDDARNTVYLQMNSLKPEDTAVYYCNVTLREVMRFKEYWGQGTQVTVSS

SEQ ID NO: 11537 - protein, 120 aa, synthetic construct
EVQLVESGGGLVQAGDSLRLSCTASGYNDHVIEMGWFRQAPGKEREFVASISTHQLYTYYADSVKGRFTISRDDARNTVYLQMNSLKPEDTAVYYCNVMQIRKDKFAEYWGQGTQVTVSS

SEQ ID NO: 11538 - protein, 120 aa, synthetic construct
EVQLVESGGGLVQAGDSLRLSCTASGSDHRTLEMGWFRQAPGKEREFVASISGCVAYTYYADSVKGRFTISRDDARNTVYLQMNSLKPEDTAVYYCNVTYVVVDGLVEYWGQGTQVTVSS

SEQ ID NO: 11539 - protein, 116 aa, synthetic construct
EVQLVESGGGLVQAGDSLRLSCTASGIEVGWFRQAPGKEREFVASISRSGHYTYYADSVKGRFTISRDDARNTVYLQMNSLKPEDTAVYYCNVVNIVDKVGKHEYWGQGTQVTVSS

SEQ ID NO: 11540 - protein, 120 aa, synthetic construct
EVQLVESGGGLVQAGDSLRLSCTASGPLITLMEMGWFRQAPGKEREFVASISDGDRYTYYADSVKGRFTISRDDARNTVYLQMNSLKPEDTAVYYCNVLCFSKFRFVEYWGQGTQVTVSS

SEQ ID NO: 11541 - protein, 120 aa, synthetic construct
EVQLVESGGGLVQAGDSLRLSCTASGKMHLAIEMGWFRQAPGKEREFVASISCREGTTYYADSVKGRFTISRDDARNTVYLQMNSLKPEDTAVYYCNVTSIIGELIREYWGQGTQVTVSS

SEQ ID NO: 11542 - protein, 119 aa, synthetic construct
EVQLVESGGGLVQAGDSLRLSCTASGKMATALEMGWFRQAPGKEREFVASISLRGHYTYYADSVKGRFTISRDDARNTVYLQMNSLKPEDTAVYYCNVTVIQLGFMEYWGQGTQVTVSS

SEQ ID NO: 11543 - protein, 120 aa, synthetic construct
EVQLVESGGGLVQAGDSLRLSCTASGIREKVIEMGWFRQAPGKEREFVASISANCDYTYYADSVKGRFTISRDDARNTVYLQMNSLKPEDTAVYYCNVTIVCRLRIREYWGQGTQVTVSS

SEQ ID NO: 11544 - protein, 120 aa, synthetic construct
EVQLVESGGGLVQAGDSLRLSCTASGKQSEFLEMGWFRQAPGKEREFVASISGTTKYTYYADSVKGRFTISRDDARNTVYLQMNSLKPEDTAVYYCNVTQFLSASYIEYWGQGTQVTVSS

SEQ ID NO: 11545 - protein, 124 aa, synthetic construct
EVQLVESGGGLVQAGDSLRLSCTASGPNEWICMGWFRQAPGKEREFVASISGSGFVTYYADSVKGRFTISRDDARNTVYLQMNSLKPEDTAVYYCNVSSVGFDDEGFRIFVEYWGQGTQVTVSS

SEQ ID NO: 11546 - protein, 120 aa, synthetic construct
EVQLVESGGGLVQAGDSLRLSCTASGLVRIPVEMGWFRQAPGKEREFVASISGLTSDTYYADSVKGRFTISRDDARNTVYLQMNSLKPEDTAVYYCNVTMFHRHSFEEYWGQGTQVTVSS

SEQ ID NO: 11547 - protein, 117 aa, synthetic construct
EVQLVESGGGLVQAGDSLRLSCTASGGRTVFKEMGWFRQAPGKEREFVASISGFGERTYYADSVKGRFTISRDDARNTVYLQMNSLKPEDTAVYYCNVVEDMTAEYWGQGTQVTVSS

SEQ ID NO: 11548 - protein, 116 aa, synthetic construct
EVQLVESGGGLVQAGDSLRLSCTASGSVARIMEMGWFRQAPGKEREFVAVYFRGRGTYYADSVKGRFTISRDDARNTVYLQMNSLKPEDTAVYYCNVFIRFEEEYWGQGTQVTVSS

SEQ ID NO: 11549 - protein, 119 aa, synthetic construct
EVQLVESGGGLVQAGDSLRLSCTASGNIRLLVEMGWFRQAPGKEREFVASISGRSSSTYYADSVKGRFTISRDDARNTVYLQMNSLKPEDTAVYYCNVTVWSLAFMEYWGQGTQVTVSS

SEQ ID NO: 11550 - protein, 121 aa, synthetic construct
EVQLVESGGGLVQAGDSLRLSCTASGARKEILEMGWFRQAPGKEREFVASISAFSGYTYYADSVKGRFTISRDDARNTVYLQMNSLKPEDTAVYYCNVVEVSLMSGFSEYWGQGTQVTVSS

SEQ ID NO: 11551 - protein, 124 aa, synthetic construct
EVQLVESGGGLVQAGDSLRLSCTASGVLGSVMEMGWFRQAPGKEREFVASISAKGTYTYYADSVKGRFTISRDDARNTVYLQMNSLKPEDTAVYYCNVSIVDRNLRGFCIVEYWGQGTQVTVSS

SEQ ID NO: 11552 - protein, 121 aa, synthetic construct
EVQLVESGGGLVQAGDSLRLSCTASGVCKHFGTMGWFRQAPGKEREFVASISVMSSETYYADSVKGRFTISRDDARNTVYLQMNSLKPEDTAVYYCNVTFQWASWGVEEYWGQGTQVTVSS

SEQ ID NO: 11553 - protein, 120 aa, synthetic construct
EVQLVESGGGLVQAGDSLRLSCTASGSGRSIIEMGWFRQAPGKEREFVASISRSCDYTYYADSVKGRFTISRDDARNTVYLQMNSLKPEDTAVYYCNVTGLKDFEINEYWGQGTQVTVSS

SEQ ID NO: 11554 - protein, 122 aa, synthetic construct
EVQLVESGGGLVQAGDSLRLSCTASGLVGMQGRMGWFRQAPGKEREFVASISIGDRHTYYADSVKGRFTISRDDARNTVYLQMNSLKPEDTAVYYCNVLCLTRGLYLFREYWGQGTQVTVSS

SEQ ID NO: 11555 - protein, 122 aa, synthetic construct
EVQLVESGGGLVQAGDSLRLSCTASGLLHTVIEMGWFRQAPGKEREFVASISNMLIYTYYADSVKGRFTISRDDARNTVYLQMNSLKPEDTAVYYCNVVALNIGLARFVEYWGQGTQVTVSS

SEQ ID NO: 11556 - protein, 120 aa, synthetic construct
EVQLVESGGGLVQAGDSLRLSCTASGVQRLKLEMGWFRQAPGKEREFVASISCVMDYTYYADSVKGRFTISRDDARNTVYLQMNSLKPEDTAVYYCNVAIIQNGRFTEYWGQGTQVTVSS

SEQ ID NO: 11557 - protein, 124 aa, synthetic construct
EVQLVESGGGLVQAGDSLRLSCTASGPTSRAVEMGWFRQAPGKEREFVASISRDKLYTYYADSVKGRFTISRDDARNTVYLQMNSLKPEDTAVYYCNVVMLVVEDNRFVPMEYWGQGTQVTVSS

SEQ ID NO: 11558 - protein, 120 aa, synthetic construct
EVQLVESGGGLVQAGDSLRLSCTASGCMGTDGEMGWFRQAPGKEREFVASISMPYVHTYYADSVKGRFTISRDDARNTVYLQMNSLKPEDTAVYYCNVKMLTGGMFVEYWGQGTQVTVSS

SEQ ID NO: 11559 - protein, 120 aa, synthetic construct
EVQLVESGGGLVQAGDSLRLSCTASGHVDAIIEMGWFRQAPGKEREFVASISHRKTYTYYADSVKGRFTISRDDARNTVYLQMNSLKPEDTAVYYCNVVAVGMRAILEYWGQGTQVTVSS

SEQ ID NO: 11560 - protein, 122 aa, synthetic construct
EVQLVESGGGLVQAGDSLRLSCTASGSLKYAVEMGWFRQAPGKEREFVASISSRDSHTYYADSVKGRFTISRDDARNTVYLQMNSLKPEDTAVYYCNVTLVRELMPYISEYWGQGTQVTVSS

SEQ ID NO: 11561 - protein, 123 aa, synthetic construct
EVQLVESGGGLVQAGDSLRLSCTASGHTQLVMEMGWFRQAPGKEREFVASISGDCCYTYYADSVKGRFTISRDDARNTVYLQMNSLKPEDTAVYYCNVTIFNPSRTAGKGEYWGQGTQVTVSS

SEQ ID NO: 11562 - protein, 121 aa, synthetic construct
EVQLVESGGGLVQAGDSLRLSCTASGGIHMMLEMGWFRQAPGKEREFVASISNRSSGTYYADSVKGRFTISRDDARNTVYLQMNSLKPEDTAVYYCNVTCLASLVGFIEYWGQGTQVTVSS

SEQ ID NO: 11563 - protein, 121 aa, synthetic construct
EVQLVESGGGLVQAGDSLRLSCTASGNGYTTLEMGWFRQAPGKEREFVASISWGILYTYYADSVKGRFTISRDDARNTVYLQMNSLKPEDTAVYYCNVTTIGQKCDFREYWGQGTQVTVSS

SEQ ID NO: 11564 - protein, 120 aa, synthetic construct
EVQLVESGGGLVQAGDSLRLSCTASGGMRDAIEMGWFRQAPGKEREFVASISGRSIYTYYADSVKGRFTISRDDARNTVYLQMNSLKPEDTAVYYCNVWKMNSVGLTEYWGQGTQVTVSS

SEQ ID NO: 11565 - protein, 124 aa, synthetic construct
EVQLVESGGGLVQAGDSLRLSCTASGSGDNFLEMGWFRQAPGKEREFVASISRHGGWTYYADSVKGRFTISRDDARNTVYLQMNSLKPEDTAVYYCNVTVLMDVVSERRFVEYWGQGTQVTVSS

SEQ ID NO: 11566 - protein, 121 aa, synthetic construct
EVQLVESGGGLVQAGDSLRLSCTASGDAQDVLEMGWFRQAPGKEREFVASISRHNMETYYADSVKGRFTISRDDARNTVYLQMNSLKPEDTAVYYCNVTVVRVTGRFFEYWGQGTQVTVSS

SEQ ID NO: 11567 - protein, 121 aa, synthetic construct
EVQLVESGGGLVQAGDSLRLSCTASKESTPVEMGWFRQAPGKEREFVASISRERRYTYYADSVKGRFTISRDDARNTVYLQMNSLKPEDTAVYYCNVTSFDYRAMHFNEYWGQGTQVTVSS

SEQ ID NO: 11568 - protein, 122 aa, synthetic construct
EVQLVESGGGLVQAGDSLRLSCTASGRGLSILEMGWFRQAPGKEREFVASISSNWIYTYYADSVKGRFTISRDDARNTVYLQMNSLKPEDTAVYYCNVVLVRMGMFVFQEYWGQGTQVTVSS

SEQ ID NO: 11569 - protein, 123 aa, synthetic construct
EVQLVESGGGLVQAGDSLRLSCTASGFLSGRKVMGWFRQAPGKEREFVASISDIGHVTYYADSVKGRFTISRDDARNTVYLQMNSLKPEDTAVYYCNVISIVNGPPFLLTEYWGQGTQVTVSS

SEQ ID NO: 11570 - protein, 119 aa, synthetic construct
EVQLVESGGGLVQAGDSLRLSCTASGNRCNVMEMGWFRQAPGKEREFVASISEKLVYTYYADSVKGRFTISRDDARNTVYLQMNSLKPEDTAVYYCFIVVINEGIREYWGQGTQVTVSS

SEQ ID NO: 11571 - protein, 121 aa, synthetic construct
EVQLVESGGGLVQAGDSLRLSCTASGMAHRVLEMGWFRQAPGKEREFVASISVPRSVTYYADSVKGRFTISRDDARNTVYLQMNSLKPEDTAVYYCNVTGVFTDMRFSEYWGQGTQVTVSS

SEQ ID NO: 11572 - protein, 125 aa, synthetic construct
EVQLVESGGGLVQAGDSLRLSCTASGPLVSLKPMGWFRQAPGKEREFVASISRRYKTTYYADSVKGRFTISRDDARNTVYLQMNSLKPEDTAVYYCNVQNVVEVLVRLGKIVEYWGQGTQVTVSS

SEQ ID NO: 11573 - protein, 119 aa, synthetic construct
EVQLVESGGGLVQAGDSLRLSCTASGCHGTMLEMGWFRQAPGKEREFVASISMLSGNTYYADSVKGRFTISRDDARNTVYLQMNSLKPEDTAVYYCLVTSIRVLFIEYWGQGTQVTVSS

SEQ ID NO: 11574 - protein, 120 aa, synthetic construct
EVQLVESGGGLVQAGDSLRLSCTASGQGVRIIEMGWFRQAPGKEREFVASISGVRYNTYYADSVKGRFTISRDDARNTVYLQMNSLKPEDTAVYYCNVTVLVGVFFDEYWGQGTQVTVSS

SEQ ID NO: 11575 - protein, 119 aa, synthetic construct
EVQLVESGGGLVQAGDSLRLSCTASGDRRGLYEMGWFRQAPGKEREFVASISAADWYTYYADSVKGRFTISRDDARNTVYLQMNSLKPEDTAVYYCRNSQLIRALLEYWGQGTQVTVSS

SEQ ID NO: 11576 - protein, 120 aa, synthetic construct
EVQLVESGGGLVQAGDSLRLSCTASGMHADGIEMGWFRQAPGKEREFVASISVVGQHTYYADSVKGRFTISRDDARNTVYLQMNSLKPEDTAVYYCNVTVFSLARRGEYWGQGTQVTVSS

SEQ ID NO: 11577 - protein, 119 aa, synthetic construct
EVQLVESGGGLVQAGDSLRLSCTASGIMERVIEMGWFRQAPGKEREFVASISWGSCYTYYADSVKGRFTISRDDARNTVYLQMNSLKPEDTAVYYCNVTAIGAYVEEYWGQGTQVTVSS

SEQ ID NO: 11578 - protein, 120 aa, synthetic construct
EVQLVESGGGLVQAGDSLRLSCTASGNIRSVMEMGWFRQAPGKEREFVASISAQDDYTYYADSVKGRFTISRDDARNTVYLQMNSLKPEDTAVYYCNVTCTASLAFLEYWGQGTQVTVSS

SEQ ID NO: 11579 - protein, 122 aa, synthetic construct
EVQLVESGGGLVQAGDSLRLSCTASGWLEQLLEMGWFRQAPGKEREFVASISGKGDYTYYADSVKGRFTISRDDARNTVYLQMNSLKPEDTAVYYCNVWRIDLVRVQVREYWGQGTQVTVSS

SEQ ID NO: 11580 - protein, 116 aa, synthetic construct
EVQLVESGGGLVQAGDSLRLSCTASGCPFTGMVVGWFRQAPGKEREFVAVFYSPLTTYYADSVKGRFTISRDDARNTVYLQMNSLKPEDTAVYYCNVPWFRDGEYWGQGTQVTVSS

SEQ ID NO: 11581 - protein, 119 aa, synthetic construct
EVQLVESGGGLVQAGDSLRLSCTASGHRGKFIEMGWFRQAPGKEREFVASISGRCLITYYADSVKGRFTISRDDARNTVYLQMNSLKPEDTAVYYCNVTLLERVFIEYWGQGTQVTVSS

SEQ ID NO: 11582 - protein, 118 aa, synthetic construct
EVQLVESGGGLVQAGDSLRLSCTASGSKSVILEMGWFRQAPGKEREFVASISATAYYTYYADSVKGRFTISRDDARNTVYLQMNSLKPEDTAVYYCNVTVLRDFAEYWGQGTQVTVSS

SEQ ID NO: 11583 - protein, 122 aa, synthetic construct
EVQLVESGGGLVQAGDSLRLSCTASGLMGVIMEMGWFRQAPGKEREFVASISFYGAYTYYADSVKGRFTISRDDARNTVYLQMNSLKPEDTAVYYCNVALLDVAMRRFREYWGQGTQVTVSS

SEQ ID NO: 11584 - protein, 118 aa, synthetic construct
EVQLVESGGGLVQAGDSLRLSCTASGGRLVFMSMGWFRQAPGKEREFVASISGFKTVTYYADSVKGRFTISRDDARNTVYLQMNSLKPEDTAVYYCNVEGSTVSNEYWGQGTQVTVSS

SEQ ID NO: 11585 - protein, 120 aa, synthetic construct
EVQLVESGGGLVQAGDSLRLSCTASGTGAAQMEMGWFRQAPGKEREFVASISMARNNTYYADSAKGRFTISRDDARNTVYLQMNSLKPEDTAVYYCNVTSLNAMRFVEYWGQGTQVTVSS

SEQ ID NO: 11586 - protein, 120 aa, synthetic construct
EVQLVESGGGLVQAGDSLRLSCTASGWVPRVIEMGWFRQAPGKEREFVASISASDGGTYYADSVKGRFTISRDDARNTVYLQMNSLKPEDTAVYYCNVTYVNDCGFGEYWGQGTQVTVSS

SEQ ID NO: 11587 - protein, 120 aa, synthetic construct
EVQLVESGGGLVQAGDSLRLSCTASGLVAEGVEMGWFRQAPGKEREFVASISMRHSYTYYADSVKGRFTISRDDARNTVYLQMNSLKPEDTAVYYCNVVGVRKGGFVEYWGQGTQVTVSS

SEQ ID NO: 11588 - protein, 119 aa, synthetic construct
EVQLVESGGGLVQAGDSLRLSCTASVEGTIIDMGWFRQAPGKEREFVASISGDGEYTYYADSVKGRFTISRDDARNTVYLQMNSLKPEDTAVYYCNVTLFCASSIVEYWGQGTQVTVSS

SEQ ID NO: 11589 - protein, 120 aa, synthetic construct
EVQLVESGGGLVQAGDSLRLSCTASGMVVEIVCMDWFRQAPGKEREFVASISSTHGYTYYADSVKGRFTISRDDARNTVYLQMNSLKPEDTAVYYCNVAAVSKLRFLEYWGQGTQVTVSS

SEQ ID NO: 11590 - protein, 121 aa, synthetic construct
EVQLVESGGGLVQAGDSLRLSCTASGRDRGILEMGWFRQAPGKEREFVASISFVGRYTYYADSVKGRFTISRDDARNTVYLQMNSLKPEDTAVYYCNVTMLQLGVGFAEYWGQGTQVTVSS

SEQ ID NO: 11591 - protein, 124 aa, synthetic construct
EVQLVESGGGLVQAGDSLRLSCTASGSLFGGIEMGWFRQAPGKEREFVASISMHYAYTYYADSVKGRFTISRDDARNTVYLQMNSLKPEDTAVYYCNVTAVRTDGSSKNFAEYWGQGTQVTVSS

SEQ ID NO: 11592 - protein, 120 aa, synthetic construct
EVQLVESGGGLVQAGDSLRLSCTASGEVKWFMEMGWFRQAPGKEREFVASISGSGSYTYYADSVKGRFTISRDDARNTVYLQMNSLKPEDTAVYYCNVVVWQGNRFREYWGQGTQVTVSS

SEQ ID NO: 11593 - protein, 120 aa, synthetic construct
EVQLVESGGGLVQAGDSLRLSCTASGRLGMVVEMGWFRQAPGKEREFVASISKWGTYTYYADSVKGRFTISRDDARNTVYLQMNSLKPEDTAVYYCNVTAFNNNGVMEYWGQGTQVTVSS

SEQ ID NO: 11594 - protein, 122 aa, synthetic construct
EVQLVESGGGLVQAGDSLRLSCTASGLVQWSSVMGWFRQAPGKEREFVASISEREVATYYADSVKGRFTISRDDARNTVYLQMNSLKPEDTAVYYCNVLAVVGVRFIIKEYWGQGTQVTVSS

SEQ ID NO: 11595 - protein, 121 aa, synthetic construct
EVQLVESGGGLVQAGDSLRLSCTASGARTVFVMMGWFRQAPGKEREFVASISGFHGNTYYADSVKGRFTISRDDARNTVYLQMNSLKPEDTAVYYCNVIGSDVSLVNGEYWGQGTQVTVSS

SEQ ID NO: 11596 - protein, 121 aa, synthetic construct
EVQLVESGGGLVQAGDSLRLSCTASGVSAVVIEMGWFRQAPGKEREFVASISGYRGETYYADSVKGRFTISRDDARNTVYLQMNSLKPEDTAVYYCNVTALSKVGGFNEYWGQGTQVTVSS

SEQ ID NO: 11597 - protein, 124 aa, synthetic construct
EVQLVESGGGLVQAGDSLRLSCTASGSNGWLIEMGWFRQAPGKEREFVASISGQAMNTYYADSVKGRFTISRDDARNTVYLQMNSLKPEDTAVYYCNVTVLGTRADSVRFMEYWGQGTQVTVSS

SEQ ID NO: 11598 - protein, 120 aa, synthetic construct
EVQLVESGGGLVQAGDSLRLSCTASGNYGTVLEMGWFRQAPGKEREFVASISAWSDYTYYADSVKGRFTISRDDARNTVYLQMNSLKPEDTAVYYCNVTVVWDNRILEYWGQGTQVTVSS

SEQ ID NO: 11599 - protein, 120 aa, synthetic construct
EVQLVESGGGLVQAGDSLRLSCTASGPGAIWLEMGWFRQAPGKEREFVASISNGGTYTYYADSVKGRFTISRDDARNTVYLQMNSLKPEDTAVYYCNVTLVGREGVFEYWGQGTQVTVSS

SEQ ID NO: 11600 - protein, 120 aa, synthetic construct
EVQLVESGGGLVQAGDSLRLSCTASGKFRATIEMGWFRQAPGKEREFVASISGMASYTYYADSVKGRFTISRDDARNTVYLQMNSLKPEDTAVYYCNVVAVVDKYFSEYWGQGTQVTVSS

SEQ ID NO: 11601 - protein, 120 aa, synthetic construct
EVQLVESGGGLVQAGDSLRLSCTASGGFRVVLEMGWFRQAPGKEREFVASISFGTPYTYYADSVKGRFTISRDDARNTVYLQMNSLKPEDTAVYYCNVTTVANVKIREYWGQGTQVTVSS

SEQ ID NO: 11602 - protein, 120 aa, synthetic construct
EVQLVESGGGLVQAGDSLRLSCTASGNRVTYLEMGWFRQAPGKEREFVASISGLRQYTYYADSVKGRFTISRDDARNTVYLQMNSLKPEDTAVYYCNVTVLGAVGIVEYWGQGTQVTVSS

SEQ ID NO: 11603 - protein, 119 aa, synthetic construct
EVQLVESGGGLVQAGDSLRLSCTASGSVGYVLEMGWFRQAPGKEREFVASISGRGRSTYYADSVKGRFTISRDDARNTVYLQMNSLKPEDTAVYYCNVVVWNGMFTEYWGQGTQVTVSS

SEQ ID NO: 11604 - protein, 119 aa, synthetic construct
EVQLVESGGGLVQAGDSLRLSCTASGRFGGLIEMGWFRQAPGKEREFVASISFSAFYTYYADSVKGRFTISRDDARNTVYLQMNSLKPEDTAVYYCNVAVFGGGFKEYWGQGTQVTVSS

SEQ ID NO: 11605 - protein, 119 aa, synthetic construct
EVQLVESGGGLVQAGDSLRLSCTASGTRGVVLEMGWFRQAPGKEREFVASISMRDAGTYYADSVKGRFTISRDDARNTVYLQMNSLKPEDTAVYYCNVVMFANGFIEYWGQGTQVTVSS

SEQ ID NO: 11606 - protein, 123 aa, synthetic construct
EVQLVESGGGLVQAGDSLRLSCTASGHLGICIEMGWFRQAPGKEREFVASISCSGLYTYYADSVKGRFTISRDDARNTVYLQMNSLKPEDTAVYYCNVTQVVIGPRSHVTEYWGQGTQVTVSS

SEQ ID NO: 11607 - protein, 120 aa, synthetic construct
EVQLVESGGGLVQAGDSLRLSCTASGRWPDKLEMGWFRQAPGKEREFVASISMIGVYTYYADSVKGRFTISRDDARNTVYLQMNSLKPEDTAVYYCNVTVIRMGRFGEYWGQGTQVTVSS

SEQ ID NO: 11608 - protein, 121 aa, synthetic construct
EVQLVESGGGLVQAGDSLRLSCTASGPVMRVMEMGWFRQAPGKEREFVASISGKDANTYYADSVKGRFTISRDDARNTVYLQMNSLKPEDTAVYYCNVWVILDHWEFGEYWGQGTQVTVSS

SEQ ID NO: 11609 - protein, 122 aa, synthetic construct
EVQLVESGGGLVQAGDSLRLSCTASGLAFVVVEMGWFRQAPGKEREFVASISGVGIYTYYADSVKGRFTISRDDARNTVYLQMNSLKPEDTAVYYCNVSALDGNTARFLEYWGQGTQVTVSS

SEQ ID NO: 11610 - protein, 122 aa, synthetic construct
EVQLVESGGGLVQAGDSLRLSCTASGGLINVLEMGWFRQAPGKEREFVASISGSALYTYYADSVKGRFTISRDDARNTVYLQMNSLKPEDTAVYYCNVTLVKVQIGVILEYWGQGTQVTVSS

SEQ ID NO: 11611 - protein, 119 aa, synthetic construct
EVQLVESGGGLVQAGDSLRLSCTASGLPGFTMEMGWFRQAPGKEREFVASISARARDTYYADSVKGRFTISRDDARNTVYLQMNSLKPEDTAVYYCRTTCLVVSFVEYWGQGTQVTVSS

SEQ ID NO: 11612 - protein, 119 aa, synthetic construct
EVQLVESGGGLVQAGDSLRLSCTASGFRIVFVMMGWFRQAPGKEREFVASISGFKQATYYADSVKGRFTISRDDARNTVYLQMNSLKPEDTAVYYCNVAMTNCNIDEYWGQGTQVTVSS

SEQ ID NO: 11613 - protein, 121 aa, synthetic construct
EVQLVESGGGLVQAGDSLRLSCTASGVVAIVLEMGWFRQAPGKEREFVASISGHRSYTYYADSVKGRFTISRDDARNTVYLQMNSLKPEDTAVYYCNVSMFSDELLLREYWGQGTQVTVSS

SEQ ID NO: 11614 - protein, 122 aa, synthetic construct
EVQLVESGGGLVQAGDSLRLSCTASGQRSMALEMGWFRQAPGKEREFVASISGYTNYTYYADSVKGRFTISRDDARNTVYLQMNSLKPEDTAVYYCNVVLLDAETGRLVEYWGQGTQVTVSS

SEQ ID NO: 11615 - protein, 124 aa, synthetic construct
EVQLVESGGGLVQAGDSLRLSCTASGMMTRVLEMGWFRQAPGKEREFVASISCRESLTYYADSVKGRFTISRDDARNTVYLQMNSLKPEDTAVYYCNVTGLENGAGIIRFREYWGQGTQVTVSS

SEQ ID NO: 11616 - protein, 121 aa, synthetic construct
EVQLVESGGGLVQAGDSLRLSCTASGRRSEVMEMGWFRQAPGKEREFVASISVHHAYTYYADSVKGRFTISRDDARNTVYLQMNSLKPEDTAVYYCNVVGSTNDVGFWEYWGQGTQVTVSS

SEQ ID NO: 11617 - protein, 120 aa, synthetic construct
EVQLVESGGGLVQAGDSLRLSCTASGRAEIMMEMCWFRQAPGKEREFVASISTRRSETYYADSVKGRFTISRDDARNTVYLQMNSLKPEDTAVYYCNVTCLSAHGLTEYWGQGTQVTVSS

SEQ ID NO: 11618 - protein, 122 aa, synthetic construct
EVQLVESGGGLVQAGDSLRLSCTASGTRTVFVTMGWFRQAPGKEREFVASISGFGAVTYYADSVKGRFTISRDDARNTVYLQMNSLKPEDTAVYYCNVDGIARPSDLDKEYWGQGTQVTVSS

SEQ ID NO: 11619 - protein, 120 aa, synthetic construct
EVQLVESGGGLVQAGDSLRLSCTASGHLRDCMEMGWFRQAPGKEREFVASISYWTDGTYYADSVKVRFTISRDDARNTVYLQMNSLKPEDTAVYYCNVTDFTGAKLEEYWGQGTQVTVSS

SEQ ID NO: 11620 - protein, 121 aa, synthetic construct
EVQLVESGGGLVQAGDSLRLSCTASGNLGHALEMGWFRQAPGKEREFVASISIHHHLTYYADSVKGRFTISRDDARNTVYLQMNSLKPEDTAVYYCNVSALVDWVRLMEYWGQGTQVTVSS

SEQ ID NO: 11621 - protein, 119 aa, synthetic construct
EVQLVESGGGLVQAGDSLRLSCTASGDMCDVLEMGWFRQAPGKEREFVASISMSRLYTYYADSVKGRFTISRDDARNTVYLQMNSLKPEDTAVYYCNVTCLGVTLIEYWGQGTQVTVSS

SEQ ID NO: 11622 - protein, 121 aa, synthetic construct
EVQLVESGGGLVQAGDSLRLSCTASGQARSLLEMGWFRQAPGKEREFVASISIVGTYTYYADSVKGRFTISRDDARNTVYLQMNSLKPEDTAVYYCNVTSLDADSRFREYWGQGTQVTVSS

SEQ ID NO: 11623 - protein, 121 aa, synthetic construct
EVQLVESGGGLVQAGDSLRLSCTASGMIRTWWFMGWFRQAPGKEREFVASISTMRGVTYYADSVKGRFTISRDDARNTVYLQMNSLKPEDTAVYYCNVLADVWDAITLEYWGQGTQVTVSS

SEQ ID NO: 11624 - protein, 120 aa, synthetic construct
EVQLVESGGGLVQAGDSLRLSCTASGICAVVMEMGWFRQAPGKEREFVASISGIGCFTYYADSVKGRFTISRDDARNTVYLQMNSLKPEDTAVYYCNVTVLSLNGKVEYWGQGTQVTVSS

SEQ ID NO: 11625 - protein, 121 aa, synthetic construct
EVQLVESGGGLVQAGDSLRLSCTASGGKGYRIEMGWFRQAPGKEREFVASISSVGTYTYYADSVKGRFTISRDDARNTVYLQMNSLKPEDTAVYYCNVVYIEKSIGKREYWGQGTQVTVSS

SEQ ID NO: 11626 - protein, 124 aa, synthetic construct
EVQLVESGGGLVQAGDSLRLSCTASGTAHDSIEMGWFRQAPGKEREFVASISVREDSTYYADSVKGRFTISRDDARNTVYLQMNSLKPEDTAVYYCNVTQYVAVSLVPGFREYWGQGTQVTVSS

SEQ ID NO: 11627 - protein, 121 aa, synthetic construct
EVQLVESGGGLVQAGDSLRLSCTASGGTVCFLEMGWFRQAPGKEREFVASISWGGAYTYYADSVKGRFTISRDDARNTVYLQMNSLKPEDTAVYYCNVVAIDHSRGFLEYWGQGTQVTVSS

SEQ ID NO: 11628 - protein, 120 aa, synthetic construct
EVQLVESGGGLVQAGDSLRLSCTASGRWGVMMEMGWFRQAPGKEREFVASISSNRGYTYYADSVKGRFTISRDDARNTVYLQMNSLKPEDTAVYYCNVVVVIGMDFGEYWGQGTQVTVSS

SEQ ID NO: 11629 - protein, 120 aa, synthetic construct
EVQLVESGGGLVQAGDSLRLSCTASGDARSGIEMGWFRQAPGKEREFVASISTQGAYTYYADSVKGRFTISRDDARNTVYLQMNSLKPEDTAVYYCNVACLGPAGMTEYWGQGTQVTVSS

SEQ ID NO: 11630 - protein, 121 aa, synthetic construct
EVQLVESGGGLVQAGDSLRLSCTASGRLWDPLEMGWFRQAPGKEREFVASISMLGRYTYYADSVKGRFTISRDDARNTVYLQMNSLKPEDTAVYYCNVMGMASSGLFIEYWGQGTQVTVSS

SEQ ID NO: 11631 - protein, 120 aa, synthetic construct
EVQLVESGGGLVQAGDSLRLSCTASGMERCCLEMGWFRQAPGKEREFVASISGNSDYTYYADSVKGRFTISRDDARNTVYLQMNSLKPEDTAVYYCNVTHVKLGRLVEYWGQGTQVTVSS

SEQ ID NO: 11632 - protein, 125 aa, synthetic construct
EVQLVESGGGLVQAGDSLRLSCTASGRLATVMEMGWFRQAPGKEREFVASISGMHTFTYYADSVKGRFTISRDDARNTVYLQMNSLKPEDTAVYYCNVTTWESPVSGDMRFAEYWGQGTQVTVSS

SEQ ID NO: 11633 - protein, 119 aa, synthetic construct
EVQLVESGGGLVQAGDSLRLSCTASGLVRFIVEMGWFRQAPGKEREFVASISGSNAYTYYADSVKGRFTISRDDARNTVYLQMNSLKPEDTAVYYCNVVGLQGMFIEYWGQGTQVTVSS

SEQ ID NO: 11634 - protein, 119 aa, synthetic construct
EVQLVESGGGLVQAGDSLRLSCTASGRIRGMLEMGWFRQAPGKEREFVASISVCLHDTYYADSVKGRFTISRDDARNTVYLQMNSLKPEDTAVYYCNVTAFHNGKMEYWGQGTQVTVSS

SEQ ID NO: 11635 - protein, 120 aa, synthetic construct
EVQLVESGGGLVQAGDSLRLSCTASGVYTDWVEMGWFRQAPGKEREFVASISGGIDYTYYADSVKGRFTISRDDARNTVYLQMNSLKPEDTAVYYCNVVIWTEHAFREYWGQGTQVTVSS

SEQ ID NO: 11636 - protein, 120 aa, synthetic construct
EVQLVESGGGLVQAGDSLRLSCTASGSRKGIMSMDWFRQAPGKEREFVASIGELAYTYYADSVKGRFTISRDDARNTVYLQMNSLKPEDTAVYYCNVLAVVVGVGFVEYWGQGTQVTVSS

SEQ ID NO: 11637 - protein, 120 aa, synthetic construct
EVQLVESGGGLVQAGDSLRLSCTASGHVVDFLEMGWFRQAPGKEREFVASISGSSVYTYYADSVKGRFTISRDDARNTVYLQMNSLKPEDTAVYYCNVTVIIDWVVGEYWGQGTQVTVSS

SEQ ID NO: 11638 - protein, 120 aa, synthetic construct
EVQLVESGGGLVQAGDSLRLSCTASGLSNEIVEMGWFRQAPGKEREFVASISRTRTYTYYADSVKGRFTISRDDARNTVYLQMNSLKPEDTAVYYCNVVTMVKCHFYEYWGQGTQVTVSS

SEQ ID NO: 11639 - protein, 119 aa, synthetic construct
EVQLVESGGGLVQAGDSLRLSCTASGLFVQSGVMGWFRQAPGKEREFVAYVIPWTYYADSVKGRFTISRDDARNTVYLQMNSLKPEDTAVYYCNVKLRNNEEGLVVEYWGQGTQVTVSS

SEQ ID NO: 11640 - protein, 121 aa, synthetic construct
EVQLVESGGGLVQAGDSLRLSCTASGISALMIEMGWFRQAPGKEREFVASISLGNHYTYYADSVKGRFTISRDDARNTVYLQMNSLKPEDTAVYYCNVTSFGVRCGIREYWGQGTQVTVSS

SEQ ID NO: 11641 - protein, 121 aa, synthetic construct
EVQLVESGGGLVQAGDSLRLSCTASGPMSRVVEMGWFRQAPGKEREFVASISGVGTYTYYADSVKGRFTISRDDARNTVYLQMNSLKPEDTAVYYCNVLVVLNSGRLLEYWGQGTQVTVSS

SEQ ID NO: 11642 - protein, 120 aa, synthetic construct
EVQLVESGGGLVQAGDSLRLSCTASGEVGQVIEMGWFRQAPGKEREFVASISMSSRYTYYADSVKGRFTISRDDARNTVYLQMNSLKPEDTAVYYCNVTRHCTNGFVEYWGQGTQVTVSS

SEQ ID NO: 11643 - protein, 120 aa, synthetic construct
EVQLVESGGGLVQAGDSLRLSCTASGERLGRIEMGWFRQAPGKEREFVASISVRTHGTYYADSVKGRFTISRDDARNTVYLQMNSLKPEDTAVYYCNVTVCDGFAFVEYWGQGTQVTVSS

SEQ ID NO: 11644 - protein, 117 aa, synthetic construct
EVQLVESGGGLVQAGDSLRLSCTASGGRIVFQSMGWFRQAPGKEREFVASISDFGCVTYYADSVKGRFTISRDDARNTVYLQMNSLKPEDTAVYYCNVTSVVAREYWGQGTQVTVSS

SEQ ID NO: 11645 - protein, 123 aa, synthetic construct
EVQLVESGGGLVQAGDSLRLSCTASGRRIVFKMMGWFRQAPGKEREFVASISGFREGTYYADSVKGRFTISRDDARNTVYLQMNSLKPEDTAVYYCNVIEDGDLIHISVLEYWGQGTQVTVSS

SEQ ID NO: 11646 - protein, 125 aa, synthetic construct
EVQLVESGGGLVQAGDSLRLSCTASGSCDTLIAMDWFRQAPGKEREFVASISGRTGYTYYADSVKGRFTISRDDARNTVYLQMNSLKPEDTAVYYCNVIVVSRLPDYRVVFCEYWGQGTQVTVSS

SEQ ID NO: 11647 - protein, 121 aa, synthetic construct
EVQLVESGGGLVQAGDSLRLSCTASGVPAVLLEMGWFRQAPGKEREFVASISGMDEGTYYADSVKGRFTISRDDARNTVYLQMNSLKPEDTAVYYCNVTVIVGWKWFSEYWGQGTQVTVSS

SEQ ID NO: 11648 - protein, 122 aa, synthetic construct
EVQLVESGGGLVQAGDSLRLSCTASGLVNMVMEIGWFRQAPGKEREFVASISGDGGYTYYADSVKGRFTISRDDARNTVYLQMNSLKPEDTAVYYCNVTVIGRVKMIIMEYWGQGTQVTVSS

SEQ ID NO: 11649 - protein, 119 aa, synthetic construct
EVQLVESGGGLVQAGDSLRLSCTASGWRGVLMEMGWFRQAPGKEREFVASISCVGAFTYYADSVKGRFTISRDDARNTVYLQMNSLKPEDTAVYYCNVTTFVRVKEEYWGQGTQVTVSS

SEQ ID NO: 11650 - protein, 120 aa, synthetic construct
EVQLVESGGGLVQAGDSLRLSCTASGSSHLILEMGWFRQAPGKEREFVASISGNTRYTYYADSVKGRFTISRDDARNTVYLQMNSLKPEDTAVYYCNVTCIVCMMIREYWGQGTQVTVSS

SEQ ID NO: 11651 - protein, 122 aa, synthetic construct
EVQLVESGGGLVQAGDSLRLSCTASGLPKNVVEMGWFRQAPGKEREFVASISGRGHYTYYADSVKGRFTISRDDARNTVYLQMNSLKPEDTAVYYCNVDAVSDRTLRLVEYWGQGTQVTVSS

SEQ ID NO: 11652 - protein, 121 aa, synthetic construct
EVQLVESGGGLVQAGDSLRLSCTASGMCHDVVEMGWFRQAPGKEREFVASISGRGWATYYADSVKGRFTISRDDARNTVYLQMNSLKPEDTAVYYCNVTDFKEDGTFREYWGQGTQVTVSS

SEQ ID NO: 11653 - protein, 120 aa, synthetic construct
EVQLVESGGGLVQAGDSLRLSCTASGRCDGLIEMGWFRQAPGKEREFVASISKGGCYTYYADSVKGRFTISRDDARNTVYLQMNSLKPEDTAVYYCNVVLVVKTGIKEYWGQGTQVTVSS

SEQ ID NO: 11654 - protein, 123 aa, synthetic construct
EVQLVESGGGLVQAGDSLRLSCTASGGVMKMIEMGWFRQAPGKEREFVASISAIRVYTYYADSVKGRFTISRDDARNTVYLQMNSLKPEDTAVYYCNVVGIEDVVRLRFCEYWGQGTQVTVSS

SEQ ID NO: 11655 - protein, 119 aa, synthetic construct
EVQLVESGGGLVQAGDSLRLSCTASGSRNSMIEMGWFRQAPGKEREFVASISGVSLETYYADSVKGRFTISRDDARNTVYLQMNSLKPEDTAVYYCNVTAFKMRFVEYWGQGTQVTVSS

SEQ ID NO: 11656 - protein, 121 aa, synthetic construct
EVQLVESGGGLVQAGDSLRLSCTASGSGESALCMGWFRQAPGKEREFVASISVRGCVTYYADSVKGRFTISRDDARNTVYLQMNSLKPEDTAVYYCNVPVWVANVGILEYWGQGTQVTVSS

SEQ ID NO: 11657 - protein, 119 aa, synthetic construct
EVQLVESGGGLVQAGDSLRLSCTASGCSRDGFEMGWFRQAPGKEREFVASISMSGGYTYYADSVKGRFTISRDDARNTVYLQMNSLKPEDTAVYYCNVSVFRAYLSEYWGQGTQVTVSS

SEQ ID NO: 11658 - protein, 117 aa, synthetic construct
EVQLVESGGGLVQAGDSLRLSCTASGVIENTLEMGWFRQAPGKEREFVASISYRGWYTYYADSVKGRFTISRDDARNTVYLQMNSLKPEDTAVYYCNVTDAVFAEYWGQGTQVTVSS

SEQ ID NO: 11659 - protein, 120 aa, synthetic construct
EVQLVESGGGLVQAGDSLRLSCTASGSEEGVIEMGWFRQAPGKEREFVASISSLQDYTYYADSVKGRFTISRDDARNTVYLQMNSLKPEDTAVYYCNVVSWERNRFKEYWGQGTQVTVSS

SEQ ID NO: 11660 - protein, 120 aa, synthetic construct
EVQLVESGGGLVQAGDSLRLSCTASGQYDEVVEMGWFRQAPGKEREFVASISGVREYTYYADSVKGRFTISRDDARNTVYLQMNSLKPEDTAVYYCNVVMVDVARFLEYWGQGTQVTVSS

SEQ ID NO: 11661 - protein, 119 aa, synthetic construct
EVQLVESGGGLVQAGDSLRLSCTASGVRGVNIEMGWFRQAPGKEREFVASISSSDDSTYYADSVKGRFTISRDDARNTVYLQMNSLKPEDTAVYYCNVTVWKTGFYEYWGQGTQVTVSS

SEQ ID NO: 11662 - protein, 119 aa, synthetic construct
EVQLVESGGGLVQAGDSLRLSCTASGASSNIMEMGWFRQAPGKEREFVASISGINKYTYYADSVKGRFTISRDDARNTVYLQMNSLKPEDTAVYYCNVVVLFPFGVEYWGQGTQVTVSS

SEQ ID NO: 11663 - protein, 120 aa, synthetic construct
EVQLVESGGGLVQAGDSLRLSCTASGLVDTIIEMGWFRQAPGKEREFVASISSRQMYTYYADSVKGRFTISRDDARNTVYLQMNSLKPEDTAVYYCNVASLMDNMFYEYWGQGTQVTVSS

SEQ ID NO: 11664 - protein, 121 aa, synthetic construct
EVQLVESGGGLVQAGDSLRLSCTASGLIPMCLEMGWFRQAPGKEREFVASISMHRWTTYYADSVKGRFTISRDDARNTVYLQMNSLKPEDTAVYYCNVTMFNVEHGFNEYWGQGTQVTVSS

SEQ ID NO: 11665 - protein, 122 aa, synthetic construct
EVQLVESGGGLVQAGDSLRLSCTASGRITYVLQMGWFRQAPGKEREFVASISGNYVITYYADSVKGRFTISRDDARNTVYLQMNSLKPEDTAVYYCNVMWLRRDVGRFEEYWGQGTQVTVSS

SEQ ID NO: 11666 - protein, 117 aa, synthetic construct
EVQLVESGGGLVQAGDSLRLSCTASGMTGRIMEMGWFRQAPGKEREFVASISFNTTYTYYADSVKGRFTISRDDARNTVYLQMNSLKPEDTAVYYCNVTCIAFREYWGQGTQVTVSS

SEQ ID NO: 11667 - protein, 124 aa, synthetic construct
EVQLVESGGGLVQAGDSLRLSCTASGREGVRVEMGWFRQAPGKEREFVASISGTVDYTYYADSVKGRFTISRDDARNTVYLQMNSLKPEDTAVYYCNVTRVLVKDNRCMIQEYWGQGTQVTVSS

SEQ ID NO: 11668 - protein, 117 aa, synthetic construct
EVQLVESGGGLVQAGDSLRLSCTASGGVGTMLEMGWFRQAPGKEREFVASISESDVYTYYADSVKGRFTISRDDARNTVYLQMNSLKPEDTAVYYCNVTNRMFVEYWGQGTQVTVSS

SEQ ID NO: 11669 - protein, 122 aa, synthetic construct
EVQLVESGGGLVQAGDSLRLSCTASGRINGVIEMGWFRQAPGKEREFVASISGSRDYTYYADSVKGRFTISRDDARNTVYLQMNSLKPEDTAVYYCNVSVFNVAVRGVMEYWGQGTQVTVSS

SEQ ID NO: 11670 - protein, 120 aa, synthetic construct
EVQLVESGGGLVQAGDSLRLSCTASGGFHVGRFMGWFRQAPGKEREFVASISVGAVVTYYADSVKGRFTISRDDARNTVYLQMNSLKPEDTAVYYCNVDCWGIVNICEYWGQGTQVTVSS

SEQ ID NO: 11671 - protein, 119 aa, synthetic construct
EVQLVESGGGLVQAGDSLRLSCTASGDRRGCIEMGWFRQAPGKEREFVASISGSSTDTYYADSVKGRFTISRDDARNTVYLQMNSLKPEDTAVYYCNVTDFVHYFIEYWGQGTQVTVSS

SEQ ID NO: 11672 - protein, 119 aa, synthetic construct
EVQLVESGGGLVQAGDSLRLSCTASGINGKAIEMGWFRQAPGKEREFVASISNQGRYTYYADSVKGRFTISRDDARNTVYLQMNSLKPEDTAVYYCNVTVFKGEFVEYWGQGTQVTVSS

SEQ ID NO: 11673 - protein, 120 aa, synthetic construct
EVQLVESGGGLVQAGDSLRLSCTASGNSAKVIEMGWFRQAPGKEREFVASISNTALYTYYADSVKGRFTISRDDARNTVYLQMNSLKPEDTAVYYCNVTGLAKKGFVEYWGQGTQVTVSS

SEQ ID NO: 11674 - protein, 120 aa, synthetic construct
EVQLVESGGGLVQAGDSLRLSCTASGLNAEVMEMGWFRQAPGKEREFVASISGLREYTYYADSVKGRFTISRDDARNTVYLQMNSLKPEDTAVYYCNVTAFGSVGWNEYWGQGTQVTVSS

SEQ ID NO: 11675 - protein, 119 aa, synthetic construct
EVQLVESGGGLVQAGDSLRLSCTASGLEAMIMEMGWFRQAPGKEREFVASISGVGVLTYYADSVKGRFTISRDDARNTVYLQMNSLKPEDTAVYYCNVTGFQEGFVEYWGQGTQVTVSS

SEQ ID NO: 11676 - protein, 120 aa, synthetic construct
EVQLVESGGGLVQAGDSLRLSCTASGGIAGVLEMGWFRQAPGKEREFVASISSTATYTYYADSVKGRFTISRDDARNTVYLQMNSLKPEDTAVYYCNVTVIANAGFVEYWGQGTQVTVSS

SEQ ID NO: 11677 - protein, 120 aa, synthetic construct
EVQLVESGGGLVQAGDSLRLSCTASGGMAQALEMGWFRQAPGKEREFVASISFVSQYTYYADSVKGRFTISRDDARNTVYLQMNSLKPEDTAVYYCNVTALVGHNFSEYWGQGTQVTVSS

SEQ ID NO: 11678 - protein, 118 aa, synthetic construct
EVQLVESGGGLVQAGDSLRLSCTASGVGRVENVMGWFRQAPGKEREFVASISGAWAGTYYADSVKGRFTISRDDARNTVYLQMNSLKPEDTAVYYCNVLLLGAWLEYWGQGTQVTVSS

SEQ ID NO: 11679 - protein, 124 aa, synthetic construct
EVQLVESGGGLVQAGDSLRLSCTASGDYAHFLEMGWFRQAPGKEREFVASISGIGVYTYYADSVKGRFTISRDDARNTVYLQMNSLKPEDTAVYYCNVTGFGTSTENCGFWEYWGQGTQVTVSS

SEQ ID NO: 11680 - protein, 120 aa, synthetic construct
EVQLVESGGGLVQAGDSLRLSCTASGGQAHILEMGWFRQAPGKEREFVASISGMKMYTYYADSVKGRFTISRDDARNTVYLQMNSLKPEDTAVYYCNVTVFVGPQLVEYWGQGTQVTVSS

SEQ ID NO: 11681 - protein, 121 aa, synthetic construct
EVQLVESGGGLVQAGDSLRLSCTASGHNDLVVEMGWFRQAPGKEREFVASISGGLNYTYYADSVKGRFTISRDDARNTVYLQMNSLKPEDTAVYYCNVTAISRAIVFNEYWGQGTQVTVSS

SEQ ID NO: 11682 - protein, 122 aa, synthetic construct
EVQLVESGGGLVQAGDSLRLSCTASGPRHVLIEMGWFRQAPGKEREFVASISCRDMYTYYADSVKGRFTISRDDARNTVYLQMNSLKPEDTAVYYCNVVMFLGNMFRFVEYWGQGTQVTVSS

SEQ ID NO: 11683 - protein, 120 aa, synthetic construct
EVQLVESGGGLVQAGDSLRLSCTASGCTNDMLEMGWFRQAPGKEREFVASISVWMHRTYYADSVKGRFTISRDDARNTVYLQMNSLKPEDTAVYYCNATTYGNFRFLEYWGQGTQVTVSS

SEQ ID NO: 11684 - protein, 124 aa, synthetic construct
EVQLVESGGGLVQAGDSLRLSCTASGKVENSVEMGWFRQAPGKEREFVASISYRSGSTYYADSVKGRFTISRDDARNTVYLQMNSLKPEDTAVYYCNVTTFGRTGEVFGKVEYWGQGTQVTVSS

SEQ ID NO: 11685 - protein, 120 aa, synthetic construct
EVQLVESGGGLVQAGDSLRLSCTASGSVRFVLEMGWFRQAPGKEREFVASISTRWMTTYYADSVKGRFTISRDDARNTVYLQMNSLKPEDTAVYYCNVTTFAHCGFDEYWGQGTQVTVSS

SEQ ID NO: 11686 - protein, 119 aa, synthetic construct
EVQLVESGGGLVQAGDSLRLSCTASGNCRLVIEMGWFRQAPGKEREFVASISGTGVYTYYADSVKGRFTISRDDARNTVYLQMNSLKPEDTAVYYCTVVVRTQFFSEYWGQGTQVTVSS

SEQ ID NO: 11687 - protein, 119 aa, synthetic construct
EVQLVESGGGLVQAGDSLRLSCTASGPGLRFVIMGWFRQAPGKEREFVASISEKTRITYYADSVKGRFTISRDDARNTVYLQMNSLKPEDTAVYYCNVMSFEEMFREYWGQGTQVTVSS

SEQ ID NO: 11688 - protein, 120 aa, synthetic construct
EVQLVESGGGLVQAGDSLRLSCTASGTRSASVEMGWFRQAPGKEREFVASISMIHTYTYYADSVKGRFTISRDDARNTVYLQMNSLKPEDTAVYYCNVVIVTEVRFAEYWGQGTQVTVSS

SEQ ID NO: 11689 - protein, 119 aa, synthetic construct
EVQLVESGGGLVQAGDSLRLSCTASGMGGSWVEMGWFRQAPGKEREFVASISAHVHYTYYADSVKGRFTISRDDARNTVYLQMNSLKPEDTAVYYCNVVVWGGRFVEYWGQGTQVTVSS

SEQ ID NO: 11690 - protein, 119 aa, synthetic construct
EVQLVESGGGLVQAGDSLRLSCTASGDMVSLMEMGWFRQAPGKEREFVASISMRWGATYYADSVKGRFTISRDDARNTVYLQMNSLKPEDTAVYYCNVTLFLNTFMEYWGQGTQVTVSS

SEQ ID NO: 11691 - protein, 119 aa, synthetic construct
EVQLVESGGGLVQAGDSLRLSCTASGLGPDILEMGWFRQAPGKEREFVASISGFHGCTYYADSVKGRFTISRDDARNTVYLQMNSLKPEDTAVYYCNVPTQAISTLEYWGQGTQVTVSS

SEQ ID NO: 11692 - protein, 121 aa, synthetic construct
EVQLVESGGGLVQAGDSLRLSCTASGRVNNTIEMGWFRQAPGKEREFVASISRRGMYTYYADSVKGRFTISRDDARNTVYLQMNSLKPEDTAVYYCNVTVLVTDAAFREYWGQGTQVTVSS

SEQ ID NO: 11693 - protein, 119 aa, synthetic construct
EVQLVESGGGLVQAGDSLRLSCTASGKYVNFLEMGWFRQAPGKEREFVASISGRGFYTYYADSVKGRFTISRDDARNTVYLQMNSLKPEDTAVYYCNVTVVLDHFSEYWGQGTQVTVSS

SEQ ID NO: 11694 - protein, 120 aa, synthetic construct
EVQLVESGGGLVQAGDSLRLSCTASGIHGVGLEMGWFRQAPGKEREFVASISRAMGHTYYADSVKGRFTISRDDARNTVYLQMNSLKPEDTAVYYCNVTSVSDIGFLEYWGQGTQVTVSS

SEQ ID NO: 11695 - protein, 120 aa, synthetic construct
EVQLVESGGGLVQAGDSLRLSCTASGITGRKMEMGWFRQAPGKEREFVASISDIMLYTYYADSVKGRFTISRDDARNTVYLQMNSLKPEDTAVYYCNVLVIGTVDVREYWGQGTQVTVSS

SEQ ID NO: 11696 - protein, 120 aa, synthetic construct
EVQLVESGGGLVQAGDSLRLSCTASGLTAWVIEMGWFRQAPGKEREFVASTSGLCAYTYYADSVKGRFTISRDDARNTVYLQMNSLKPEDTAVYYCNVLFIDAVGVSEYWGQGTQVTVSS

SEQ ID NO: 11697 - protein, 123 aa, synthetic construct
EVQLVESGGGLVQAGDSLRLSCTASGMHCVFQNMGWFRQAPGKEREFVASISWDWIHTYYADSVKGRFTISRDDARNTVYLQMNSLKPEDTAVYYCNVGDKLAATHLRSVEYWGQGTQVTVSS

SEQ ID NO: 11698 - protein, 120 aa, synthetic construct
EVQLVESGGGLVQAGDSLRLSCTASGVMGMQLEMGWFRQAPGKEREFVASISIAGSITYYADSVKGRFTISRDDARNTVYLQMNSLKPEDTAVYYCNVTTHVLAGFKEYWGQGTQVTVSS

SEQ ID NO: 11699 - protein, 125 aa, synthetic construct
EVQLVESGGGLVQAGDSLRLSCTASGISGVKVSMGWFRQAPGKEREFVASISASGCVTYYADSVKGRFTISRDDARNTVYLQMNSLKPEDTAVYYCNVVAAIRTATGILTFKEYWGQGTQVTVSS

SEQ ID NO: 11700 - protein, 120 aa, synthetic construct
EVQLVESGGGLVQAGDSLRLSCTASGHNPKVMEMGWFRQAPGKEREFVASISMNNVYTYYADSVKGRFTISRDDARNTVYLQMNSLKPEDTAVYYCNVVVIRVRGFTEYWGQGTQVTVSS

SEQ ID NO: 11701 - protein, 120 aa, synthetic construct
EVQLVESGGGLVQAGDSLRLSCTASGDNDGLLEMGWFRQAPGKEREFVASISRRIDYTYYADSVKGRFTISRDDARNTVYLQMNSLKPEDTAVYYCNVVGFTAATLREYWGQGTQVTVSS

SEQ ID NO: 11702 - protein, 120 aa, synthetic construct
EVQLVESGGGLVQAGDSLRLSCTASGVGSGGLEMGWFRQAPGKEREFVASISIRDWQTYYADSVKGRFTISRDDARNTVYLQMNSLKPEDTAVYYCNVTAMDIRMFVEYWGQGTQVTVSS

SEQ ID NO: 11703 - protein, 118 aa, synthetic construct
EVQLVESGGGLVQAGDSLRLSCTASGIPDTVLEMGWFRQAPGKEREFVASISGTGCYTYYADSVKGRFTISRDDARNTVYLQMNSLKPEDTAVYYCNVVTATVFVEYWGQGTQVTVSS

SEQ ID NO: 11704 - protein, 122 aa, synthetic construct
EVQLVESGGGLVQAGDSLRLSCTASGRRMTCIEMGWFRQAPGKEREFVASISGLGMYTYYADSVKGRFTISRDDARNTVYLQMNSLKPEDTAVYYCNVTAVQVDSNRIAEYWGQGTQVTVSS

SEQ ID NO: 11705 - protein, 120 aa, synthetic construct
EVQLVESGGGLVQAGDSLRLSCTASGSTKVPIEMGWFRQAPGKEREFVASISKAIMYTYYADSVKGRFTISRDDARNTVYLQMNSLKPEDTAVYYCNVTILSGARFHEYWGQGTQVTVSS

SEQ ID NO: 11706 - protein, 120 aa, synthetic construct
EVQLVESGGGLVQAGDSLRLSCTASGDKGCRVEMGWFRQAPGKEREFVASISMGLAYTYYADSVKGRFTISRDDARNTVYLQMNSLKPEDTAVYYCNVVVVAVSGFLEYWGQGTQVTVSS

SEQ ID NO: 11707 - protein, 123 aa, synthetic construct
EVQLVESGGGLVQAGDSLRLSCTASGSRAGMIEMGWFRQAPEKEREFVASISVNYMVTYYADSVKGRFTISRDDARNTVYLQMNSLKPEDTAVYYCNVTAFRAAQQSRFVEYWGQGTQVTVSS

SEQ ID NO: 11708 - protein, 121 aa, synthetic construct
EVQLVESGGGLVQAGDSLRLSCTASGLARGIMEMGWFRQAPGKEREFVASISGNVRYTYYADSVKGRFTISRDDARNTVYLQMNSLKPEDTAVYYCNVTTILDQLGFYEYWGQGTQVTVSS

SEQ ID NO: 11709 - protein, 124 aa, synthetic construct
EVQLVESGGGLVQAGDSLRLSCTASGRMDRTVEMGWFRQAPGKEREFVASISSFSDYTYYADSVKGRFTISRDDARNTVYLQMNSLKPEDTAVYYCNVSALEMIGTAIRLIEYWGQGTQVTVSS

SEQ ID NO: 11710 - protein, 122 aa, synthetic construct
EVQLVESGGGLVQAGDSLRLSCTASGLVRGLFTMGWFRQAPGKEREFVASISKRWSKTYYADSVKGRFTISRDDARNTVYLQMNSLKPEDTAVYYCNVAKHRVFLAFENEYWGQGTQVTVSS

SEQ ID NO: 11711 - protein, 120 aa, synthetic construct
EVQLVESGGGLVQAGDSLRLSCTTSGSLLGVMEMGWFRQAPGKEREFVASISDARGDTYYADSVKGRFTISRDDARNTVYLQMNSLKPEDTAVYYCNVTVMHYMGKLEYWGQGTQVTVSS

SEQ ID NO: 11712 - protein, 121 aa, synthetic construct
EVQLVESGGGLVQAGDSLRLSCTASGQIAFAVEMGWFRQAPGKEREFVASISGMRNETYYADSVKGRFTISRDDARNTVYLQMNSLKPEDTAVYYCNVTTFNLIFKFLEYWGQGTQVTVSS

SEQ ID NO: 11713 - protein, 117 aa, synthetic construct
EVQLVESGGGLVQAGDSLRLSCTASGGSRHMMEMGWFRQAPGKEREFVASISTTVDYTYYADSVKGRFTISRDDARNTVYLQMNSLKPEDTAVYYCNVTSDQFLEYWGQGTQVTVSS

SEQ ID NO: 11714 - protein, 121 aa, synthetic construct
EVQLVESGGGLVQAGDSLRLSCTASGNPSNDKPMGWFRQAPGKEREFVASISDGVNRTYYADSVKGRFTISRDDARNTVYLQMNSLKPEDTAVYYCNVLRAIFFLLEDEYWGQGTQVTVSS

SEQ ID NO: 11715 - protein, 120 aa, synthetic construct
EVQLVESGGGLVQAGDSLRLSCTASGILKFVLEMGWFRQAPGKEREFVASISGTRHYTYYADSVKGRFTISRDDARNTVYLQMNSLKPEDTAVYYCNVTTVGVKGLTEYWGQGTQVTVSS

SEQ ID NO: 11716 - protein, 120 aa, synthetic construct
EVQLVESGGGLVQAGDSLRLSCTASGKGSYVLEMGWFRQAPGKEREFVASISKSGPYTYYADSVKGRFTISRDDARNTVYLQMNSLKPEDTAVYYCNVTTVTHMCVVEYWGQGTQVTVSS

SEQ ID NO: 11717 - protein, 119 aa, synthetic construct
EVQLVESGGGLVQAGDSLRLSCTASGYAYVILEMGWFRQAPGKEREFVASISGVSDYTYYADSVKGRFTISRDDARNTVYLQMNSLKPEDTAVYYCNVTVGVPFGREYWGQGTQVTVSS

SEQ ID NO: 11718 - protein, 121 aa, synthetic construct
EVQLVESGGGLVQAGDSLRLSCTASGDRGSLVEMGWFRQAPGKEREFVASISGFHQDTYYADSVKGRFTISRDDARNTVYLQMNSLKPEDTAVYYCNVVRLNARPALDEYWGQGTQVTVSS

SEQ ID NO: 11719 - protein, 120 aa, synthetic construct
EVQLVESGGGLVQAGDSLRLSCTASGGTLYVVEMGWFRQAPGKEREFVASISGAGQRTYYADSVKGRFTISRDDARNTVYLQMNSLKPEDTAVYYCNVTVLNVTRFDEYWGQGTQVTVSS

SEQ ID NO: 11720 - protein, 120 aa, synthetic construct
EVQLVESGGGLVQAGDSLRLSCTASGRGNLLVEMGWFRQAPGKEREFVASISMSGVYTYYADSVKGRFTISRDDARNTVYLQMNSLKPEDTAVYYCNVTCIMMGRVNEYWGQGTQVTVSS

SEQ ID NO: 11721 - protein, 120 aa, synthetic construct
EVQLVESGGGLVQAGDSLRLSCTASGNVIKFMEMGWFRQAPGKEREFVASISGISGGTYYADSVKGRFTISRDDARNTVYLQMNSLKPEDTAVYYCNVTIHLAGKFVEYWGQGTQVTVSS

SEQ ID NO: 11722 - protein, 119 aa, synthetic construct
EVQLVESGGGLVQAGDSLRLSCTASGIMGVVFMMGWFRQAPGKEREFVASISTGWDVTYYADSVKGRFTISRDDARNTVYLQMNSLKPEDTAVYYCNVIMVNWNWLEYWGQGTQVTVSS

SEQ ID NO: 11723 - protein, 120 aa, synthetic construct
EVQLVESGGGLVQAGDSLRLSCTASGTDLIILEMGWFRQAPGKEREFVASISLNHQYTYYADSVKGRFTISRDDARNTVYLQMNSLKPEDTAVYYCNVLSVSGGRFIEYWGQGTQVTVSS

SEQ ID NO: 11724 - protein, 121 aa, synthetic construct
EVQLVESGGGLVQAGDSLRLSCTASGRRAGVLEMGWFRQAPGKEREFVASISVKNCSTYYADSVKGRFTISRDDARNTVYLQMNSLKPEDTAVYYCNVTVFWNYTRFVEYWGQGTQVTVSS

SEQ ID NO: 11725 - protein, 119 aa, synthetic construct
EVQLVESGGGLVQAGDSLRLSCTASGRLVLVIEMGWFRQAPGKEREFVASISGTSDYTYYADSVKGRFTISRDDARNTVYLQMNSLKPEDTAVYYCNVTTVGLKVSEYWGQGTQVTVSS

SEQ ID NO: 11726 - protein, 121 aa, synthetic construct
EVQLVESGGGLVQAGDSLRLSCTASGKGRGVIEMGWFRQAPGKEREFVASISAIGYYTYYADSVKGRFTISRDDARNTVYLQMNSLKPEDTAVYYCNVTSLELSWVIIEYWGQGTQVTVSS

SEQ ID NO: 11727 - protein, 124 aa, synthetic construct
EVQLVESGGGLVQAGDSLRLSCTASGTGMYRGPMGWFRQAPGKEREFVASISSNATGTYYADSVKGRFTISRDDARNTVYLQMNSLKPEDTAVYYCNVLRAIWDLVVAYHEEYWGQGTQVTVSS

SEQ ID NO: 11728 - protein, 124 aa, synthetic construct
EVQLVESGGGLVQAGDSLRLSCTASGIAGLIIEMGWFRQAPGKEREFVASISGRSTSTYYADSVKGRFTISRDDARNTVYLQMNSLKPEDTAVYYCNVSVFRFIDVPVHFVEYWGQGTQVTVSS

SEQ ID NO: 11729 - protein, 121 aa, synthetic construct
EVQLVESGGGLVQAGDSLRLSCTASGEKSVMLEMGWFRQAPGKEREFVASISCRYGGTYYADSVKGRFTISRDDARNTVYLQMNSLKPEDTAVYYCNVTHVPVDYRFAEYWGQGTQVTVSS

SEQ ID NO: 11730 - protein, 123 aa, synthetic construct
EVQLVESGGGLVQAGDSLRLSCTASGGGMKVVEMGWFRQAPGKEREFVASISGAGEATYYADSVKGRFTLSRDDARNTVYLQMNSLKPEDTAVYYCNVTWFKLLPKFGFEEYWGQGTQVTVSS

SEQ ID NO: 11731 - protein, 120 aa, synthetic construct
EVQLVESGGGLVQAGDSLRLSCTASGKTRSIVEMGWFRQAPGKEREFVASISAHHVYTYYADSVKGRFTISRDDARNTVYLQMNSLKPEDTAVYYCNVTAFVGMHVREYWGQGTQVTVSS

SEQ ID NO: 11732 - protein, 120 aa, synthetic construct
EVQLVESGGGLVQAGDSLRLSCTASGTNEGMLEMGWFRQAPGKEREFVASISARARGTYYADSVKGRFTISRDDARNTVYLQMNSLKPEDTAVYYCNVTSVTLGGFSEYWGQGTQVTVSS

SEQ ID NO: 11733 - protein, 120 aa, synthetic construct
EVQLVESGGGLVQAGDSLRLSCTASGLGGQKVEMGWFRQAPGKEREFVASISIRDDYTYYADSVKGRFTISRDDARNTVYLQMNSLKPEDTAVYYCNVTVLTFNSFAEYWGQGTQVTVSS

SEQ ID NO: 11734 - protein, 125 aa, synthetic construct
EVQLVESGGGLVQAGDSLRLSCTASGIVARTIEMGWFRQAPGKEREFVASISGGGDYTYYADSVKGRFTISRDDARNTVYLQMNSLKPEDTAVYYCNVTMIKGIGMYTTFFVEYWGQGTQVTVSS

SEQ ID NO: 11735 - protein, 119 aa, synthetic construct
EVQLVESGGGLVQAGDSLRLSCTASGQARGIVEMGWFRQAPGKEREFVASISGTKLYTYYADSVKGRFTISRDDARNTVYLQMNSLKPEDTAVYYCNVTQVLDAIEEYWGQGTQVTVSS

SEQ ID NO: 11736 - protein, 119 aa, synthetic construct
EVQLVESGGGLVQAGDSLRLSCTASGGMIVFKDMGWFRQAPGKEREFVASISDFRGRTYYADSVKGRFTISRDDARNTVYLQMNSLKPEDTAVYYCNVITKVRVAEEYWGQGTQVTVSS

SEQ ID NO: 11737 - protein, 122 aa, synthetic construct
EVQLVESGGGLVQAGDSLRLSCTASGFVQVPVEMGWFRQAPGKEREFVASISGVGTYTYYADSVKGRFTISRDDARNTVYLQMNSLKPEDTAVYYCNVTAVRWSQPLIIEYWGQGTQVTVSS

SEQ ID NO: 11738 - protein, 117 aa, synthetic construct
EVQLVESGGGLVQAGDSLRLSCTASGVRKGVLEMGWFRQAPGKEREFVASISGRGGRTYYADSVKGRFTISRDDARNTVYLQMNSLKPEDTAVYYCNVTDLVFSEYWGQGTQVTVSS

SEQ ID NO: 11739 - protein, 119 aa, synthetic construct
EVQLVESGGGLVQAGDSLRLSCTASGSPAPFIEMGWFRQAPGKEREFVASISGAREYTYYADSVKGRFTISRDDARNTVYLQMNSLKPEDTAVYYCNVVYVQLKFSEYWGQGTQVTVSS

SEQ ID NO: 11740 - protein, 122 aa, synthetic construct
EVQLVESGGGLVQAGDSLRLSCTASGGMGVVLEMGWFRQAPGKEREFVASISGRSGLTYYADSVKGRFTISRDDARNTVYLQMNSLKPEDTAVYYCNVTGVVERGSRFVEYWGQGTQVTVSS

SEQ ID NO: 11741 - protein, 118 aa, synthetic construct
EVQLVESGGGLVQAGDSLRLSCTASGHEDVNGRMGWFRQAPGKEREFVASISTARQTTYYADSVKGRFTISRDDARNTVYLQMNSLKPEDTAVYYCNVLDLACWTEYWGQGTQVTVSS

SEQ ID NO: 11742 - protein, 120 aa, synthetic construct
EVQLVESGGGLVQAGDSLRLSCTASGQSHYKVEMGWFRQAPGKEREFVASISGSNSLTYYADSVKGRFTISRDDARNTVYLQMNSLKPEDTAVYYCNVVTWSSVGFFEYWGQGTQVTVSS

SEQ ID NO: 11743 - protein, 120 aa, synthetic construct
EVQLVESGGGLVQAGDSLRLSCTASGVRAVFLDMGWFRQAPGKEREFVASISGFGGTTYYADSVKGRFTISRDDARNTVYLQMNSLKPEDTAVYYCNVLGHNTWNGGEYWGQGTQVTVSS

SEQ ID NO: 11744 - protein, 122 aa, synthetic construct
EVQLVESGGGLVQAGDSLRLSCTASGVNNGIIEMGWFRQAPGKEREFVASISGRTRLTYYADSVKGRFTISRDDARNTVYLQMNSLKPEDTAVYYCNVTLVDMSDFRFREYWGQGTQVTVSS

SEQ ID NO: 11745 - protein, 122 aa, synthetic construct
EVQLVESGGGLVQAGDSLRLSCTASGRQGVIVDMGWFRQAPGKEREFVASISGAHGATYYADSVKGRFTISRDDARNTVYLQMNSLKPEDTAVYYCNVTVWRAPSFGFVEYWGQGTQVTVSS

SEQ ID NO: 11746 - protein, 120 aa, synthetic construct
EVQLVESGGGLVQAGDSLRLSCTASGNMMEFMEMGWFRQAPGKEREFVASISRNRGYTYYADSVKGRFTISRDDARNTVYLQMNSLKPEDTAVYYCNVLVVVGRMISEYWGQGTQVTVSS

SEQ ID NO: 11747 - protein, 121 aa, synthetic construct
EVQLVESGGGLVQAGDSLRLSCTASGVMGWIIDMGWFRQAPGKEREFVASISRADDNTYYADSVKGRFTISRDDARNTVYLQMNSLKPEDTAVYYCNVTTIVSFRGFVEYWGQGTQVTVSS

SEQ ID NO: 11748 - protein, 120 aa, synthetic construct
EVQLVESGGGLVQAGDSLRLSCTASGSTHTVMEMGWFRQAPGKEREFVASISGTGVYTYYADSVKGRFTISRDDARNTVYLQMNSLKPEDTAVYYCNVVLVEERTFREYWGQGTQVTVSS

SEQ ID NO: 11749 - protein, 120 aa, synthetic construct
EVQLVESGGGLVQAGDSLRLSCTASGSMRFIMEMGWFRQAPGKEREFVASISGRGDYTYYADSVKGRFTISRDDARNTVYLQMNSLKPEDTAVYYCNVTSFARGMFCEYWGQGTQVTVSS

SEQ ID NO: 11750 - protein, 121 aa, synthetic construct
EVQLVESGGGLVQAGDSLRLSCTASGSRLMLISMDWFRQAPGKEREFVASISGATTYTYYADSVKGRFTISRDDARNTVYLQMNSLKPEDTAVYYCNVVNLSRAMTFREYWGQGTQVTVSS

SEQ ID NO: 11751 - protein, 117 aa, synthetic construct
EVQLVESGGGLVQAGDSLRLSCTASGVSATKMEMSWFRQAPGKEREFVASISVRTCATYYADSVKGRFTISRDDARNTVYLQMNSLKPEDTAVYYCNVTCVDFSEYWGQGTQVTVSS

SEQ ID NO: 11752 - protein, 120 aa, synthetic construct
EVQLVESGGGLVQAGDSLRLSCTASGMDDLGLEMGWFRQAPGKEREFVASISVAGGYTYYADSVKGRFTISRDDARNTVYLQMNSLKPEDTAVYYARRTGIVGHHLAEYWGQGTQVTVSS

SEQ ID NO: 11753 - protein, 120 aa, synthetic construct
EVQLVESGGGLVQAGDSLRLSCTASGFNGQELEMGWFRQAPGKEREFVASISMRTDYTYYADSVKGRFTISRDDARNTVYLQMNSLKPEDTAVYYCNVTMCTSISITEYWGQGTQVTVSS

SEQ ID NO: 11754 - protein, 120 aa, synthetic construct
EVQLVESGGGLVQAGDSLRLSCTASGISGYMLEMGWFRQAPGKEREFVASISGNQGETYYADSVKGRFTISRDDARNTVYLQMNSLKPEDTAVYYCNVTAKNREGFVEYWGQGTQVTVSS

SEQ ID NO: 11755 - protein, 119 aa, synthetic construct
EVQLVESGGGLVQAGDSLRLSCTASGDVSSVIEMGWFRQAPGKEREFVASISGKGMQTYYADSVKGRFTISRDDARNTVYLQMNSLKPEDTAVYYCNVVEFRFGFLEYWGQGTQVTVSS

SEQ ID NO: 11756 - protein, 121 aa, synthetic construct
EVQLVESGGGLVQAGDSLRLSCTASGMDDCGIEMGWFRQAPGKEREFVASISIFGARTYYADSVKGRFTISRDDARNTVYLQMNSLKPEDTAVYYCNVTALVSMRGFREYWGQGTQVTVSS

SEQ ID NO: 11757 - protein, 119 aa, synthetic construct
EVQLVESGGGLVQAGDSLRLSCTASGLAGTVIEMGWFRQAPGKEREFVASISTRSMYTYYADSVKGRFTISRDDARNTVYLQMNSLKPEDTAVYYCNVTGMGIRMFEYWGQGTQVTVSS

SEQ ID NO: 11758 - protein, 117 aa, synthetic construct
EVQLVESGGGLVQAGDSLRLSCTASGHVGMWMEMGWFRQAPGKEREFVASISGLHIYTYYADSVKGRFTISRDDARNTVYLQMNSLKPEDTAVYYCNVVDYRLVEYWGQGTQVTVSS

SEQ ID NO: 11759 - protein, 119 aa, synthetic construct
EVQLVESGGGLVQAGDSLRLSCTASGVEHGVVEMGWFRQAPGKEREFVASISARRTYTYYADSVKGRFTISRDDARNTVYLQMNSLKPEDTAVYYCNVTCVGTNINEYWGQGTQVTVSS

SEQ ID NO: 11760 - protein, 122 aa, synthetic construct
EVQLVESGGGLVQAGDSLRLSCTASGRVHQVIEMGWFRQAPGKEREFVASISIRVDYTYYADSVKGRFTISRDDARNTVYLQMNSLKPEDTAVYYCNVVGLASDPTRIVEYWGQGTQVTVSS

SEQ ID NO: 11761 - protein, 119 aa, synthetic construct
EVQLVESGGGLVQAGDSLRLSCTASGNRHGWLEMGWFRQAPGKEREFVASISGSIEYTYYADSVKGRFTISRDDARNTVYLQMNSLKPEDTAVYYCNVTVVNQSVCEYWGQGTQVTVSS

SEQ ID NO: 11762 - protein, 124 aa, synthetic construct
EVQLVESGGGLVQAGDSLRLSCTASGVVPVIMEMGWFRQAPGKEREFVASISGRLTQTYYADSVKGRFTISRDDARNTVYLQMNSLKPEDTAVYYCNVTAFRLGVVRPHKQEYWGQGTQVTVSS

SEQ ID NO: 11763 - protein, 120 aa, synthetic construct
EVQLVESGGGLVQAGDSLRLSCTASGHVDMILEMGWFRQAPGKEREFVASISGNRSYTYYADSVKGRFTISRDDARNTVYLQMNSLKPEDTAVYYCNVLSIRRGIVGEYWGQGTQVTVSS

SEQ ID NO: 11764 - protein, 123 aa, synthetic construct
EVQLVESGGGLVQAGDSLRLSCTASGVIDNVIEMGWFRQAPGKEREFVASISYTGAYTYYADSVKGRFTISRDDARNTVYLQMNSLKPEDTAVYYCNVTRVCIAACVVKEEYWGQGTQVTVSS

SEQ ID NO: 11765 - protein, 120 aa, synthetic construct
EVQLVESGGGLVQAGDSLRLSCTASGVRRDPMEMGWFRQAPGKEREFVASISIYQMYTYYADSVKGRFTISRDDARNTVYLQMNSLKPEDTAVYYCNVVEFNGCVFSEYWGQGTQVTVSS

SEQ ID NO: 11766 - protein, 117 aa, synthetic construct
EVQLVESGGGLVQAGDSLRLSCTASGKVIAVIEMGWFRQAPGKEREFVASISWAGSYTYYADSVKGRFTISRDDARNTVYLQMNSLKPEDTAVYYCNVTSVGFMEYWGQGTQVTVSS

SEQ ID NO: 11767 - protein, 119 aa, synthetic construct
EVQLVESGGGLVQAGDSLRLSCTASGPACGYVEMGWFRQAPGKEREFVASISGGDVYTYYADSVKGRFTISRDDARNTVYLQMNSLKPEDTAVYYCNVTQFLGRIREYWGQGTQVTVSS

SEQ ID NO: 11768 - protein, 121 aa, synthetic construct
EVQLVESGGGLVQAGDSLRLSCTASGLGAHYIEMGWFRQAPGKEREFVASISVQNETTYYADSVKGRFTISRDDARNTVYLQMNSLKPEDTAVYYCNVTSVMMLMRFFEYWGQGTQVTVSS

SEQ ID NO: 11769 - protein, 122 aa, synthetic construct
EVQLVESGGGLVQAGDSLRLSCTASGYILGYLEMGWFRQAPGKEREFVASISCLHHGTYYADSVKGRFTISRDDARNTVYLQMNSLKPEDTAVYYCNVTSFHSAQGRFREYWGQGTQVTVSS

SEQ ID NO: 11770 - protein, 120 aa, synthetic construct
EVQLVESGGGLVQAGDSLRLSCTASGIGIVGDNMGWFRQAPGKEREFVASISGWAPRTYYADSVKGRFTISRDDARNTVYLQMNSLKPEDTAVYYCNVAFGTLCVKLEYWGQGTQVTVSS

SEQ ID NO: 11771 - protein, 119 aa, synthetic construct
EVQLVESGGGLVQAGDSLRLSCTASGELSGVMEMGWFRQAPGKEREFVASISGIRWETYYADSVKGRFTISRDDARNTVYLQMNSLKPEDTAVYYCNVTMLVRFFLEYWGQGTQVTVSS

SEQ ID NO: 11772 - protein, 120 aa, synthetic construct
EVQLVESGGGLVQAGDSLRLSCTASGGVVRFLEMGWFRQAPGKEREFVASISGVRLYTYYADSVKGRFTISRDDARNTVYLQMNSLKPEDTAVYYCNVVTFEIGGFVEYWGQGTQVTVSS

SEQ ID NO: 11773 - protein, 119 aa, synthetic construct
EVQLVESGGGLVQAGDSLRLSCTASGTIDNILEMGWFRQAPGKEREFVASISKQGIYTYYADSVKGRFTISRDDARNTVYLQMNSLKPEDTAVYYCNVTVLMCRVLEYWGQGTQVTVSS

SEQ ID NO: 11774 - protein, 121 aa, synthetic construct
EVQLVESGGGLVQAGDSLRLSCTASGYINFVIEMGWFRQAPGKEREFVASISWQRIYTYYADSVKGRFTISRDDARNTVYLQMNSLKPEDTAVYYCNVVGLTSVAGFREYWGQGTQVTVSS

SEQ ID NO: 11775 - protein, 120 aa, synthetic construct
EVQLVESGGGLVQAGDSLRLSCTASGARGVILEMGWFRQAPGKEREFVASISTGGGYTYYADSVKGRFTISRDDARNTVYLQMNSLKPEDTAVYYCNVVVFGNFSLFEYWGQGTQVTVSS

SEQ ID NO: 11776 - protein, 119 aa, synthetic construct
EVQLVESGGGLVQAGDSLRLSCTASGSGQGMIEMGWFRQAPGKEREFVASISTQGNYTYYADSVKGRFTISRDDARNTVYLQMNSLKPEDTAVYYCNVTTVSNIVCEYWGQGTQVTVSS

SEQ ID NO: 11777 - protein, 121 aa, synthetic construct
EVQLVESGGGLVQAGDSLRLSCTASGMTSMVLEMGWFRQAPGKEREFVASISGGVVYTYYADSVKGRFTISRDDARNTVYLQMNSLKPEDTAVYYCNVTGIERGVRPTEYWGQGTQVTVSS

SEQ ID NO: 11778 - protein, 121 aa, synthetic construct
EVQLVESGGGLVQAGDSLRLSCTASGMLAAVIEMGWFRQAPGKEREFVASISGFGTYTYYADSVKGRFTISRDDARNTVYLQMNSLKPEDTAVYYCNVLIVCNSVGVKEYWGQGTQVTVSS

SEQ ID NO: 11779 - protein, 120 aa, synthetic construct
EVQLVESGGGLVQAGDSLRLSCTASGRHDGVLEMGWFRQAPGKEREFVASISKKADYTYYADSVKGRFTISRDDARNTVYLQMNSLKPEDTAVYYCNVTRINDRRIVEYWGQGTQVTVSS

SEQ ID NO: 11780 - protein, 122 aa, synthetic construct
EVQLVESGGGLVQAGDSLRLSCTASGPRTGVIEMGWFRQAPGKEREFVASISTGGDYTYYADSVKGRFTISRDDARNTVYLQMNSLKPEDTAVYYCNVTVHVMAASMFAEYWGQGTQVTVSS

SEQ ID NO: 11781 - protein, 120 aa, synthetic construct
EVQLVESGGGLVQAGDSLRLSCTASGAGNCFMEMGWFRQAPGKEREFVASISWREYVTYYADSVKGRFTISRDDARNTVYLQMNSLKPEDTAVYYCNVTMVTRIGFVEYWGQGTQVTVSS

SEQ ID NO: 11782 - protein, 123 aa, synthetic construct
EVQLVESGGGLVQAGDSLRLSCTASGDNVLVLEMGWFRQAPGKEREFVASISGAGSYTYYADSVKGRFTISRDDARNTVYLQMNSLKPEDTAVYYCNVVHIVGTPVYGFVEYWGQGTQVTVSS

SEQ ID NO: 11783 - protein, 120 aa, synthetic construct
EVQLVESGGGLVQAGDSLRLSCTASGLIRGIIEMGWFRQAPGKEREFVASISDRSMYTYYADSVKGRFTISRDDARNTVYLQMNSLKPEDTAVYYCNVVSFFGSVFREYWGQGTQVTVSS

SEQ ID NO: 11784 - protein, 119 aa, synthetic construct
EVQLVESGGGLVQAGDSLRLSCTASGMCHDVVEMGWFRQAPGKEREFVASISGRGWATYYADSVKGRFTISRDDARNTVYLQMNSLKPEDTAVYYCNVTTFARRFVEYWGQGTQVTVSS

SEQ ID NO: 11785 - protein, 121 aa, synthetic construct
EVQLVESGGGLVQAGDSLRLSCTASGSLGALLEMGWFRQAPGKEREFVASISGGRVYTYYADSVKGRFTISRDDARNTVYLQMNSLKPEDTAVYYCNVTCLASGRTFQEYWGQGTQVTVSS

SEQ ID NO: 11786 - protein, 120 aa, synthetic construct
EVQLVESGGGLVQAGDSLRLSCTASGDSIYWIEMGWFRQAPGKEREFVASISWGWSDTYYADSVKGRFTISRDDARNTVYLQMNSLKPEDTAVYYCNVTALGLQRFNEYWGQGTQVTVSS

SEQ ID NO: 11787 - protein, 121 aa, synthetic construct
EVQLVESGGGLVQAGDSLRLSCTASGRRLRIIEMGWFRQAPGKEREFVASISGSGQRTYYADSVKGRFTISRDDARNTVYLQMNSLKPEDTAVYYCNVTVIDRGIGFVEYWGQGTQVTVSS

SEQ ID NO: 11788 - protein, 120 aa, synthetic construct
EVQLVESGGGLVQAGDSLRLSCTASGRSRKCVEMGWFRQAPGKEREFVASISSWATYTYYADSVKGRFTISRDDARNTVYLQMNSLKPEDTAVYYCNVTAMLDTGRVEYWGQGTQVTVSS

SEQ ID NO: 11789 - protein, 119 aa, synthetic construct
EVQLVESGGGLVQAGDSLRLSCTASGRAGSLIEMGWFRQAPGKEREFVASISGNMAYTYYADSVKGRFTISRDDARNTVYLQMNSLKPEDTAVYYCNVTVIRVGIVEYWGQGTQVTVSS

SEQ ID NO: 11790 - protein, 120 aa, synthetic construct
EVQLVESGGGLVQAGDSLRLSCTASGSETGMIEMGWFRQAPGKEREFVASISVRSGVTYYADSVKGRFTISRDDARNTVYLQMNSLKPEDTAVYYCNVTTFSVDGKTEYWGQGTQVTVSS

SEQ ID NO: 11791 - protein, 120 aa, synthetic construct
EVQLVESGGGLVQAGDSLRLSCTASGWPVMSIEMGWFRQAPGKEREFVASISATRVLTYYADSVKGRFTISRDDARNTVYLQMNSLKPEDTAVYYCNVTALVGLYFMEYWGQGTQVTVSS

SEQ ID NO: 11792 - protein, 119 aa, synthetic construct
EVQLVESGGGLVQAGDSLRLSCTASGKSRTCIEMGWFRQAPGKEREFVASISVRDGLTYYADSVKGRFTISRDDARNTVYLQMNSLKPEDTAVYYCNVSDMGVLKREYWGQGTQVTVSS

SEQ ID NO: 11793 - protein, 121 aa, synthetic construct
EVQLVESGGGLVQAGDSLRLSCTASGQIKIPIEMGWFRQAPGKEREFVASISVPRGHTYYADSVKGRFTISRDDARNTVYLQMNSLKPEDTAVYYCNVTALNSRMGFIEYWGQGTQVTVSS

SEQ ID NO: 11794 - protein, 120 aa, synthetic construct
EVQLVESGGGLVQAGDSLRLSCTASGQMESAIEMGWFRQAPGKEREFVASISCLWASTYYADSVKGRFTISRDDARNTVYLQMNSLKPEDTAVYYCNVTDFVSGMFVEYWGQGTQVTVSS

SEQ ID NO: 11795 - protein, 113 aa, synthetic construct
EVQLVESGGGLVQAGDSLRLSCTASGYLEMGWFRQAPGKEREFVASISGLLEYTYYADSVKGRFTISRDDARNTVYLQMNSLKPEDTAVYYCNVTTFIFHEYWGQGTQVTVSS

SEQ ID NO: 11796 - protein, 121 aa, synthetic construct
EVQLVESGGGLVQAGDSLRLSCTASGHNGAVLEMGWFRQAPGKEREFVASISGLGVYTYYADSVKGRFTISRDDARNTVYLQMNSLKPEDTAVYYCNVLSWDIHGGISEYWGQGTQVTVSS

SEQ ID NO: 11797 - protein, 121 aa, synthetic construct
EVQLVESGGGLVQAGDSLRLSCTASGNVDSVMYMGWFRQAPGKEREFVASISGAHAYTYYADSVKGRFTISRDDARNTVYLQMNSLKPEDTAVYYCNVDPFVLIGLSGEYWGQGTQVTVSS

SEQ ID NO: 11798 - protein, 121 aa, synthetic construct
EVQLVESGGGLVQAGDSLRLSCTASGGVSAAIEMGWFRQAPGKEREFVASISGNLAYTYYADSVKGRFTISRDDARNTVYLQMNSLKPEDTAVYYCNVTMIGVTAVFMEYWGQGTQVTVSS

SEQ ID NO: 11799 - protein, 122 aa, synthetic construct
EVQLVESGGGLVQAGDSLRLSCTASGPRGLIMEMGWFRQAPGKEREFVASISWNQVYTYYADSVKGRFTISRDDARNTVYLQMNSLKPEDTAVYYCNVMEFNNAVGLFIEYWGQGTQVTVSS

SEQ ID NO: 11800 - protein, 118 aa, synthetic construct
EVQLVESGGGLVQAGDSLRLSCTASGVEISEVIMGWFRQAPGKEREFVARSFGVTLTYYADSVKGRFTISRDDARNTVYLQMNSLKPEDTAVYYCNVIADGGQRMEYWGQGTQVTVSS

SEQ ID NO: 11801 - protein, 120 aa, synthetic construct
EVQLVESGGGLVQAGDSLRLSCTASGSGDRTIEMGWFRQAPGKEREFVASTSYVGGYTYYADSVKGRFTISRDDARNTVYLQMNSLKPEDTAVYYCNVVGHGKFGFTEYWGQGTQVTVSS

SEQ ID NO: 11802 - protein, 119 aa, synthetic construct
EVQLVESGGGLVQAGDSLRLSCTASGVYRGVVEMGWFRQAPGKEREFVASISMNGNYTYYADSVKGRFTISRDDARNTVYLQMNSLKPEDTAVYYCNVTALDTRIREYWGQGTQVTVSS

SEQ ID NO: 11803 - protein, 118 aa, synthetic construct
EVQLVESGGGLVQAGDSLRLSCTASGVDYGRIVMGWFRQAPGKEREFVANIHNGGEHTYYADSVKGRFTISRDDARNTVYLQMNSLKPEDTAVYYCNVLHCKRWVEYWGQGTQVTVSS

SEQ ID NO: 11804 - protein, 121 aa, synthetic construct
EVQLVESGGGLVQAGDSLRLSCTASGVIGRPLDMGWFRQAPGKEREFVASISCVHVYTYYADSVKGRFTISRDDARNTVYLQMNSLKPEDTAVYYCNVTTLVVGFRLDEYWGQGTQVTVSS

SEQ ID NO: 11805 - protein, 125 aa, synthetic construct
EVQLVESGGGLVQAGDSLRLSCTASGMEDCALEMSWFRQAPGKEREFVASISMMHAHTYYADSVKGRFTISRDDARNTVYLQMNSLKPEDTAVYYCNVTSFVVMNLERGVFREYWGQGTQVTVSS

SEQ ID NO: 11806 - protein, 120 aa, synthetic construct
EVQLVESGGGLVQAGDSLRLSCTASGNRERAHFMGWFRQAPGKEREFVASISGTGSVTYYADSVKGRFTISRDDARNTVYLQMNSLKPEDTAVYYCNVDMWGCVVLAEYWGQGTQVTVSS

SEQ ID NO: 11807 - protein, 120 aa, synthetic construct
EVQLVESGGGLVQAGDSLRLSCTASGMGPDVIEMGWFRQAPGKEREFVASISGRGDYTYYADSVKGRFTISRDDARNTVYLQMNSLKPEDTAVYYCNVSVVGCLRFNEYWGQGTQVTVSS

SEQ ID NO: 11808 - protein, 125 aa, synthetic construct
EVQLVESGGGLVQAGDSLRLSCTASGWHTLHGQMGWFRQAPGKEREFVASISSPGAATYYADSVKGRFTISRDDARNTVYLQMNSLKPEDTAVYYCNVIGFFKFLEVRVVWVEYWGQGTQVTVSS

SEQ ID NO: 11809 - protein, 120 aa, synthetic construct
EVQLVESGGGLVQAGDSLRLSCTASGLSKETLEMGWFRQAPGKEREFVASISGASHYTYYADSVKGRFTISRDDARNTVYLQMNSLKPEDTAVYYCNVVKFIMGQFREYWGQGTQVTVSS

SEQ ID NO: 11810 - protein, 124 aa, synthetic construct
EVQLVESGGGLVQAGDSLRLSCTASGGTLGILEMGWFRQAPGKEREFVASISARVEYTYYADSVKGRFTISRDDARNTVYLQMNSLKPEDTAVYYCNVTVLTHSDTLISLHEYWGQGTQVTVSS

SEQ ID NO: 11811 - protein, 119 aa, synthetic construct
EVQLVESGGGLVQAGDSLRLSCTASGLKMTLIEMGWFRQAPGKEREFVASISSVAVYTYYADSVKGRFTISRDDARNTVYLQMNSLKPEDTAVYYCNVRKARWHHQEYWGQGTQVTVSS

SEQ ID NO: 11812 - protein, 121 aa, synthetic construct
EVQLVESGGGLVQAGDSLRLSCTASGQVLEMGWFRQAPGKEREFVASISGNGAYTYYADSVKGRFTISRDDARNTVYLQMNSLKPEDTAVYYCNVTKMVAENGHVAVMEYWGQGTQVTVSS

SEQ ID NO: 11813 - protein, 120 aa, synthetic construct
EVQLVESGGGLVQAGDSLRLSCTASGLSGTVLEMGWFRQAPGKEREFVASISGGTTYTYYADSVKGRFTISRDDARNTVYLQMNSLKPEDTAVYYCNVAGIEHGAILEYWGQGTQVTVSS

SEQ ID NO: 11814 - protein, 120 aa, synthetic construct
EVQLVESGGGLVQAGDSLRLSCTASGQRSLWLEMGWFRQAPGKEREFVASISTRDGYTYYADSVKGRFTISRDDARNTVYLQMNSLKPEDTAVYYCNATTFISTKLREYWGQGTQVTVSS

SEQ ID NO: 11815 - protein, 122 aa, synthetic construct
EVQLVESGGGLVQAGDSLRLSCTASGKRQDVLEMGWFRQAPGKEREFVASISGSVIYTYYADSVKGRFTISRDDARNTVYLQMNSLKPEDTAVYYCNVVVVLRKMGMFVEYWGQGTQVTVSS

SEQ ID NO: 11816 - protein, 118 aa, synthetic construct
EVQLVESGGGLVQAGDSLRLSCTASGHRMGFKSMGWFRQAPGKEREFVASISGFGAHTYYADSVKGRFTISRDDARNTVYLQMNSLKPEDTAVYYCNVDGGEGPIEYWGQGTQVTVSS

SEQ ID NO: 11817 - protein, 119 aa, synthetic construct
EVQLVESGGGLVQAGDSLRLSCTASGLRRLPIEMGWFRQAPGKEREFVASISIRRSYTYYADSVKGRFTISRDDARNTVYLQMNSLKPEDTAVYYCNVTIMFEIFNEYWGQGTQVTVSS

SEQ ID NO: 11818 - protein, 120 aa, synthetic construct
EVQLVESGGGLVQAGDSLRLSCTASGHTEHAIEMGWFRQAPGKEREFVASISRNVFYTYYADSVKGRFTISRDDARNTVYLQMNSLKPEDTAVYYCNVSTVLGGHLLEYWGQGTQVTVSS

SEQ ID NO: 11819 - protein, 123 aa, synthetic construct
EVQLVESGGGLVQAGDSLRLSCTASGDRAHLMSMGWFRQAPGKEREFVASISVLDGCTYYADSVKGRFTISRDDARNTVYLQMNSLKPEDTAVYYCNVTRFTPHNPPYKREYWGQGTQVTVSS

SEQ ID NO: 11820 - protein, 119 aa, synthetic construct
EVQLVESGGGLVQAGDSLRLSCTASGMMAHVVEMGWFRQAPGKEREFVASISGRDRMTYYADSVKGRFTISRDDARNTVYLQMNSLKPEDTAVYYCNVWVISLVFQEYWGQGTQVTVSS

SEQ ID NO: 11821 - protein, 121 aa, synthetic construct
EVQLVESGGGLVQAGDSLRLSCTASGLAGAGIEMGWFRQAPGKEREFVASISVAMGLTYYADSVKGRFTISRDDARNTVYLQMNSLKPEDTAVYYCNVTTVRWWLGFVEYWGQGTQVTVSS

SEQ ID NO: 11822 - protein, 120 aa, synthetic construct
EVQLVESGGGLVQAGDSLRLSCTASGTVDGVIEMGWFRQAPGKEREFVASISMKGGRTYYADSVKGRFTISRDDARNTVYLQMNSLKPEDTAVYYCNVTALGMIRFEEYWGQGTQVTVSS

SEQ ID NO: 11823 - protein, 123 aa, synthetic construct
EVQLVESGGGLVQAGDSLRLSCTASQTAIGQDMGWFRQAPGKEREFVASISDGLVITYYADSVKGRFTISRDDARNTVYLQMNSLKPEDTAVYYCNVRQIRHNEHGLEFAEYWGQGTQVTVSS

SEQ ID NO: 11824 - protein, 119 aa, synthetic construct
EVQLVESGGGLVQAGDSLRLSCTASGDDQGLVEMGWFRQAPGKEREFVASISIARVYTYYADSVKGRFTISRDDARNTVYLQMNSLKPEDTAVYYCNVTRIKNAVVEYWGQGTQVTVSS

SEQ ID NO: 11825 - protein, 120 aa, synthetic construct
EVQLVESGGGLVQAGDSLRLSCTASGLVGLAIEMGWFRQAPGKEREFVASISGQGTYTYYADSVKGRFTISRDDARNTVYLQMNSLKPEDTAVYYCNVVVNHPSRMLEYWGQGTQVTVSS

SEQ ID NO: 11826 - protein, 124 aa, synthetic construct
EVQLVESGGGLVQAGDSLRLSCTASGDVNNSVEMGWFRQAPGKEREFVASISGRTMYTYYADSVKGRFTISRDDARNTVYLQMNSLKPEDTAVYYCNVICLLGIGRFVCFREYWGQGTQVTVSS

SEQ ID NO: 11827 - protein, 121 aa, synthetic construct
EVQLVESGGGLVQAGDSLRLSCTASGCRGVVVEMGWFRQAPGKEREFVASISGANRLTYYADSVKGRFTISRDDARNTVYLQMNSLKPEDTAVYYCNVTLYNLGMRFIEYWGQGTQVTVSS

SEQ ID NO: 11828 - protein, 125 aa, synthetic construct
EVQLVESGGGLVQAGDSLRLSCTASGRCNQVVEMGWFRQAPGKEREFVASISGNGRYTYYADSVKGRFTISRDDARNTVYLQMNSLKPEDTAVYYCNVTVVGRLDSVITFFAEYWGQGTQVTVSS

SEQ ID NO: 11829 - protein, 119 aa, synthetic construct
EVQLVESGGGLVQAGDSLRLSCTASGSIKWALEMGWFRQAPGKEREFVASISVKRHWTYYADSVKGRFTISWDDARNTVYLQMNSLKPEDTAVYYCNVTVWNIIFAEYWGQGTQVTVSS

SEQ ID NO: 11830 - protein, 119 aa, synthetic construct
EVQLVESGGGLVQAGDSLRLSCTASGGGDAMVEMGWFRQAPGKEREFVASTSQNGHYTYYADSVKGRFTISRDDARNTVYLQMNSLKPEDTAVYYCNVVIVRERFCEYWGQGTQVTVSS

SEQ ID NO: 11831 - protein, 121 aa, synthetic construct
EVQLVESGGGLVQAGDSLRLSCTASGEVGRYMKMGWFRQAPGKEREFVASISTGVGVTYYADSVKGRFTISRDDARNTVYLQMNSLKPEDTAVYYCNSVIVRMSIVFAEYWGQGTQVTVSS

SEQ ID NO: 11832 - protein, 120 aa, synthetic construct
EVQLVESGGGLVQAGDSLRLSCTASGIVDIVLEMGWFRQAPGKEREFVASISGRVHYTYYADSVKGRFTISRDDARNTVYLQMNSLKPEDTAVYYCNVTVIDPGHLFEYWGQGTQVTVSS

SEQ ID NO: 11833 - protein, 121 aa, synthetic construct
EVQLVESGGGLVQAGDSLRLSCTASGVVMPDSVMGWFRQAPGKEREFVASISIAGLDTYYADSVKGRFTISRDDARNTVYLQMNSLKPEDTAVYYCGQLHSIYGIWGAEYWGQGTQVTVSS

SEQ ID NO: 11834 - protein, 121 aa, synthetic construct
EVQLVESGGGLVQAGDSLRLSCTASGVPGHLLEMGWFRQAPGKEREFVASISGDGFYTYYADSVKGRFTISRDDARNTVYLQMNSLKPEDTAVYYCNVVVCVECCVFREYWGQGTQVTVSS

SEQ ID NO: 11835 - protein, 122 aa, synthetic construct
EVQLVESGGGLVQAGDSLRLSCTASGVTDRCLEMGWFRQAPGKEREFVASISKAVAYTYYADSVKGRFTISRDDARNTVYLQMNSLKPEDTAVYYCNVTCLENSGVRIIEYWGQGTQVTVSS

SEQ ID NO: 11836 - protein, 120 aa, synthetic construct
EVQLVESGGGLVQAGDSLRLSCTASGSCKGIIEMGWFRQAPGKEREFVASISGRTLDTYYADSVKGRFTISRDDARNTVYLQMNSLKPEDTAVYYCNVAMFIYGAFDEYWGQGTQVTVSS

SEQ ID NO: 11837 - protein, 120 aa, synthetic construct
EVQLVESGGGLVQAGDSLRLSCTASGVLERIIEMGWFRQAPGKEREFVASISGSHVGTYYADSVKGRFTISRDDARNTVYLQMNSLKPEDTAVYYCNVVSSCCSGFSEYWGQGTQVTVSS

SEQ ID NO: 11838 - protein, 122 aa, synthetic construct
EVQLVESGGGLVQAGDSLRLSCTASGEAQEVVEMGWFRQAPGKEREFVASISRRGGLTYYADSVKGRFTISRDDARNTVYLQMNSLKPEDTAVYYCNVTRIIPDRWMFAEYWGQGTQVTVSS

SEQ ID NO: 11839 - protein, 121 aa, synthetic construct
EVQLVESGGGLVQAGDSLRLSCTASGIVDMVDVMGWFRQAPGKEREFVASISKARIGTYYADSVKGRFTISRDDARNTVYLQMNSLKPEDTAVYYCNVTIQVWDWILGEYWGQGTQVTVSS

SEQ ID NO: 11840 - protein, 120 aa, synthetic construct
EVQLVESGGGLVQAGDSLRLSCTASGESRCVLEMGWFRQAPGKEREFVASISGNRAYTYYADSVKGRFTISRDDARNTVYLQMNSLKPEDTAVYYCNVSIFKNVVKDEYWGQGTQVTVSS

SEQ ID NO: 11841 - protein, 121 aa, synthetic construct
EVQLVESGGGLVQAGDSLRLSCTASGSNGVDIGMGWFRQAPGKEREFVASISCPIGETYYADSVKGRFTISRDDARNTVYLQMNSLKPEDTAVYYCNVTTLVVGSCFLEYWGQGTQVTVSS

SEQ ID NO: 11842 - protein, 119 aa, synthetic construct
EVQLVESGGGLVQAGDSLRLSCTASGGNVVEMGWFRQAPGKEREFVASISGGGSYTYYADSVKGRFTISRDDARNTVYLQMNSLKPEDTAVYYCNVVYSLDRVWLVEYWGQGTQVTVSS

SEQ ID NO: 11843 - protein, 122 aa, synthetic construct
EVQLVESGGGLVQAGDSLRLSCTASGKASPALEMGWFRQAPGKEREFVASISVWNRYTYYADSVKGRFTISRDDARNTVYLQMNSLKPEDTAVYYCNVTAMSGYHVGFVEYWGQGTQVTVSS

SEQ ID NO: 11844 - protein, 120 aa, synthetic construct
EVQLVESGGGLVQAGDSLRLSCTASGVMGSIMEMGWFRQAPGKEREFVASISGFGSRTYYADSVKGRFTISRDDARNTVYLQMNSLKPEDTAVYYCNVCEVQVNKEVEYWGQGTQVTVSS

SEQ ID NO: 11845 - protein, 119 aa, synthetic construct
EVQLVESGGGLVQAGDSLRLSCTASGSIDALLEMGWFRQAPGKEREFVASISGAGAYTYYADSVKGRFTISRDDARNTVYLQMNSLKPEDTAVYYCNVSYWHRMKLEYWGQGTQVTVSS

SEQ ID NO: 11846 - protein, 120 aa, synthetic construct
EVQLVESGGGLVQAGDSLRLSCTASGCRPGVIEMGWFRQAPGKEREFVASISGTDVRTYYADSVKGRFTISRDDARNTVYLQMNSLKPEDTAVYYCNVTQITSAGFVEYWGQGTQVTVSS

SEQ ID NO: 11847 - protein, 121 aa, synthetic construct
EVQLVESGGGLVQAGDSLRLSCTASGTVEGCVEMGWFRQAPGKEREFVASISGTDAYTYYADSVKGRFTISRDDARNTVYLQMNSLKPEDTAVYYCNVTVFKTVFGRVEYWGQGTQVTVSS

SEQ ID NO: 11848 - protein, 125 aa, synthetic construct
EVQLVESGGGLVQAGDSLRLSCTASGTMHDTLEMGWFRQAPGKEREFVASISGTSLYTYYADSVKGRFTISRDDARNTVYLQMNSLKPEDTAVYYCNVTLCGGHRIDGVLVREYWGQGTQVTVSS

SEQ ID NO: 11849 - protein, 121 aa, synthetic construct
EVQLVESGGGLVQAGDSLRLSCTASGKYGVVLEMGWFRQAPGKEREFVASISGSAEYTYYADSVKGRFTISRDDARNTVYLQMNSLKPEDTAVYYCNVTFLVAMRHKREYWGQGTQVTVSS

SEQ ID NO: 11850 - protein, 119 aa, synthetic construct
EVQLVESGGGLVQAGDSLRLSCTASGMAAAILEMGWFRQAPGKEREFVASISGTGWYTYYADSVKGRFTISRDDARNTVYLQMNSLKPEDTAVYYCNVVIVAGARVEYWGQGTQVTVSS

SEQ ID NO: 11851 - protein, 120 aa, synthetic construct
EVQLVESGGGLVQAGDSLRLSCTASGGLPPFVEMGWFRQAPGKEREFVASIGNMTYTYYADSVKGRFTISRDDARNTVYLQMNSLKPEDTAVYYCNVVCAIEDYGFVEYWGQGTQVTVSS

SEQ ID NO: 11852 - protein, 120 aa, synthetic construct
EVQLVESGGGLVQAGDSLRLSCTASGMEGSHLEMGWFRQAPGKEREFVASISVRRHLTYYADSVKGRFTISRDDARNTVYLQMNSLKPEDTAVYYCNVSVVSTGGFREYWGQGTQVTVSS

SEQ ID NO: 11853 - protein, 121 aa, synthetic construct
EVQLVESGGGLVQAGDSLRLSCTASGRPERLIEMGWFRQAPGKEREFVASISGQTHTTYYADSVKGRFTISRDDARNTVYLQMNSLKPEDTAVYYCNVTALSLTGAFREYWGQGTQVTVSS

SEQ ID NO: 11854 - protein, 121 aa, synthetic construct
EVQLVESGGGLVQAGDSLRLSCTASGHGNRVLIMGWFRQAPGKEREFVANIWCYDWTYYADSVKGRFTISRDDARNTVYLQMNSLKPEDTAVYYCNVIMKYILMGEATEYWGQGTQVTVSS

SEQ ID NO: 11855 - protein, 120 aa, synthetic construct
EVQLVESGGGLVQAGDSLRLSCTASGGKVKMLEMGWFRQAPGKEREFVASISFTREYTYYADSVKGRFTISRDDARNTVYLQMNSLKPEDTAVYYCNVSLLGPGRFDEYWGQGTQVTVSS

SEQ ID NO: 11856 - protein, 120 aa, synthetic construct
EVQLVESGGGLVQAGDSLRLSCTASGISSRCIEMGWFRQAPGKEREFVASISGYCPYTYYADSVKGRFTISRDDARNTVYLQMNSLKPEDTAVYYCNVTTIVANRIGEYWGQGTQVTVSS

SEQ ID NO: 11857 - protein, 119 aa, synthetic construct
EVQLVESGGGLVQAGDSLRLSCTASGTRGITMEMGWFRQAPGKEREFVASISGRHEATYYADSVKGRFTISRDDARNTVYLQMNSLKPEDTAVYYCNVTTISRGFSEYWGQGTQVTVSS

SEQ ID NO: 11858 - protein, 119 aa, synthetic construct
EVQLVESGGGLVQAGDSLRLSCTASGVRGWTIEMGWFRQAPGKEREFVASISGVGNITYYADSVKGRFTISRDDARNTVYLQMNSLKPEDTAVYYCNVTAWDLAFEEYWGQGTQVTVSS

SEQ ID NO: 11859 - protein, 122 aa, synthetic construct
EVQLVESGGGLVQAGDSLRLSCTASGVMDCMLEMGWFRQAPGKEREFVASISVQRTVTYYADSVKGRFTISRDDARNTVYLQMNSLKPEDTAVYYCNVTTVAQRAARFDEYWGQGTQVTVSS

SEQ ID NO: 11860 - protein, 121 aa, synthetic construct
EVQLVESGGGLVQAGDSLRLSCTASGVVVPMIEMGWFRQAPGKEREFVASISFGSIYTYYADSVKGRFTISRDDARNTVYLQMNSLKPEDTAVYYCNVIAFSLDAGFGEYWGQGTQVTVSS

SEQ ID NO: 11861 - protein, 122 aa, synthetic construct
EVQLVESGGGLVQAGDSLRLSCTASGMVDRVSEMGWFRQAPGKERKFVASISSVGEYTYYADSVKGRFTISRDDARNTVYLQMNSLKPEDTAVYYCNVNGCNNHEFVWWEYWGQGTQVTVSS

SEQ ID NO: 11862 - protein, 121 aa, synthetic construct
EVQLVESGGGLVQAGDSLRLSCTASGLRDDLVEMGWFRQAPGKEREFVASISARNAYTYYADSVKGRFTISRDDARNTVYLQMNSLKPEDTAVYYCNVTCIGGRPNFREYWGQGTQVTVSS

SEQ ID NO: 11863 - protein, 120 aa, synthetic construct
EVQLVESGGGLVQAGDSLRLSCTASGGRIVFRIMGWFRQAPGKEREFVASISDFGLKTYYADSVKGRFTISRDDARNTVYLQMNSLKPEDTAVYYCNCLLPFSIVNVEYWGQGTQVTVSS

SEQ ID NO: 11864 - protein, 119 aa, synthetic construct
EVQLVESGGGLVQAGDSLRLSCTASGSLNNSIEMGWFRQAPGKEREFVASISRREWYTYYADSVKGRFTISRDDARNTVYLQMNSLKPEDTAVYYCNVTLIDTLIKEYWGQGTQVTVSS

SEQ ID NO: 11865 - protein, 117 aa, synthetic construct
EVQLVESGGGLVQAGDSLRLSCTASGHSIGWMIMGWFRQAPGKEREFVASISGELGITYYADSVKGRFTISRDDARNTVYLQMNSLKPEDTAVYYCNVVDVRIREYWGQGTQVTVSS

SEQ ID NO: 11866 - protein, 121 aa, synthetic construct
EVQLVESGGGLVQAGDSLRLSCTASGEGAMRVEMGWFRQAPGKEREFVASISAMASYTYYADSVKGRFTISRDEARNTVYLQMNSLKPEDTAVYYCNVVQLVDCVGFVEYWGQGTQVTVSS

SEQ ID NO: 11867 - protein, 120 aa, synthetic construct
EVQLVESGGGLVQAGDSLRLSCTASGGRGLVIEMGWFRQAPGKEREFVASISGVGIYTYYADSVKGRFTISRDDARNTVYLQMNSLKPEDTAVYYCNVFLSGDYIFSEYWGQGTQVTVSS

SEQ ID NO: 11868 - protein, 121 aa, synthetic construct
EVQLVESGGGLVQAGDSLRLSCTASGTLRNAMEIGWFRQAPGKEREFVASISVYWGTTYYADSVKGRFTISRDDARNTVYLQMNSLKPEDTAVYYCNVTNFVASKFFTEYWGQGTQVTVSS

SEQ ID NO: 11869 - protein, 120 aa, synthetic construct
EVQLVESGGGLVQAGDSLRLSCTASGRSRDVLEMGWFRQAPGKEREFVASISGAGVYTYYADSVKGRFTISRDDARNTVYLQMNSLKPEDTAVYYCNVFIAVPECCREYWGQGTQVTVSS

SEQ ID NO: 11870 - protein, 120 aa, synthetic construct
EVQLVESGGGLVQAGDSLRLSCTASGNITGHLSMDWFRQAPGKEREFVASISGTRLYTYYADSVKGRFTISRDDARNTVYLQMNSLKPEDTAVYYCNVVVAGIRAFVEYWGQGTQVTVSS

SEQ ID NO: 11871 - protein, 121 aa, synthetic construct
EVQLVESGGGLVQAGDSLRLSCTASGLVDRVVEMGWFRQAPGKEREFVASISGQSKATYYADSVKGRFTISRDDARNTVYLQMNSLKPEDTAVYYCNVTLLIMGVSFEEYWGQGTQVTVSS

SEQ ID NO: 11872 - protein, 121 aa, synthetic construct
EVQLVESGGGLVQAGDSLRLSCTASGIVGGVLEMGWFRQAPGKEREFVASISNDGRYTYYADSVKGRFTISRDDARNTVYLQMNSLKPEDTAVYYCNVTSLNHRLGKLEYWGQGTQVTVSS

SEQ ID NO: 11873 - protein, 120 aa, synthetic construct
EVQLVESGGGLVQAGDSLRLSCTASGTRTGVIEMGWFRQAPGKEREFVASISGLYAYTYYADSVKGRFTISRDDARNTVYLQMNSLKPEDTAVYYCNVTCVTRIGVQEYWGQGTQVTVSS

SEQ ID NO: 11874 - protein, 121 aa, synthetic construct
EVQLVESGGGLVQAGDSLRLSCTASGFNGTMIEMGWFRQAPGKEREFVASISGRGANTYYADSVKGRFTISRDDARNTVYLQMNSLKPEDTAVYYCNVTFFGPQDAFIEYWGQGTQVTVSS

SEQ ID NO: 11875 - protein, 120 aa, synthetic construct
EVQLVESGGGLVQAGDSLRLSCTASGNLCKAVEMGWFRQAPGKEREFVASISVRALMTYYADSVKGRFTISRDDARNTVYLQMNSLKPEDTAVYYCNVTAIGTRGFDEYWGQGTQVTVSS

SEQ ID NO: 11876 - protein, 120 aa, synthetic construct
EVQLVESGGGLVQAGDSLRLSCTASGDGAYALEMGWFRQAPGKEREFVASISVHRTYTYYADSVKGRFTISRDDARNTVYLQMNSLKPEDTAVYYCNVATMTSGRLVEYWGQGTQVTVSS

SEQ ID NO: 11877 - protein, 125 aa, synthetic construct
EVQLVESGGGLVQAGDSLRLSCTASGTRAVFMDMGWFRQAPGKEREFVASISMAARATYYADSVKGRFTISRDDARNTVYLQMNSLKPEDTAVYYCNVDSQHGGLIWLNLCGEYWGQGTQVTVSS

SEQ ID NO: 11878 - protein, 119 aa, synthetic construct
EVQLVESGGGLVQAGDSLRLSCTASGGQGFGYHMGWFRQAPGKEREFVASISGVNDYTYYADSVKGRFTISRDDARNTVYLQMNSLKPEDTAVYYCNVVVFDMGFEEYWGQGTQVTVSS

SEQ ID NO: 11879 - protein, 119 aa, synthetic construct
EVQLVESGGGLVQAGDSLRLSCTASGTRMPVIEMGWFRQAPGKEREFVASISGRSSSTYYADSVKGRFTISRDDARNTVYLQMNSLKPEDTAVYYCNVVQFNELFYEYWGQGTQVTVSS

SEQ ID NO: 11880 - protein, 121 aa, synthetic construct
EVQLVESGGGLVQAGDSLRLSCTASGDSRSHIEMGWFRQAPGKEREFVASISRSAVYTYYADSVKGRFTISRDDARNTVYLQMNSLKPEDTAVYYCNVTCLKALVGLVEYWGQGTQVTVSS

SEQ ID NO: 11881 - protein, 120 aa, synthetic construct
EVQLVESGGGLVQAGDSLRLSCTASGGRNMIIEMGWFRQAPGKEREFVASISYGGLYTYYADSVKGRFTISRDDARNTVYLQMNSLKPEDTAVYYCNVTGISASSISEYWGQGTQVTVSS

SEQ ID NO: 11882 - protein, 120 aa, synthetic construct
EVQLVESGGGLVQAGDSLRLSCTASGNGRAYLEMGWFRQAPGKEREFVASISNLRLTTYYADSVKGRFTISRDDARNTVYLQMNSLKPEDTAVYYCNVTTFVHPWFREYWGQGTQVTVSS

SEQ ID NO: 11883 - protein, 122 aa, synthetic construct
EVQLVESGGGLVQAGDSLRLSCTASGTLGGFLEMGWFRPAPGKEREFVASISVNMGYTYYADSVKGRFTISRDDARNTVYLQMNSLKPEDTAVYYCNVVQVNTMIMIFREYWGQGTQVTVSS

SEQ ID NO: 11884 - protein, 120 aa, synthetic construct
EVQLVESGGGLVQAGDSLRLSCTASGHHNQMLIMGWFRQAPGKEREFVASISGTKNVTYYADSVKGRFTISRDDARNTVYLQMNSLKPEDTAVYYCNVVVYRMGGFNEYWGQGTQVTVSS

SEQ ID NO: 11885 - protein, 123 aa, synthetic construct
EVQLVESGGGLVQAGDSLRLSCTASGEDRFYIEMGWFRQAPGKEREFVASISARNDYTYYADSVKGRFTISRDDARNTVYLQMNSLKPEDTAVYYCNVTLLVVHDGVLVLEYWGQGTQVTVSS

SEQ ID NO: 11886 - protein, 121 aa, synthetic construct
EVQLVESGGGLVQAGDSLRLSCTASGNTDMIWKMGWFRQAPGKEREFVASISISSGETYYADSVKGRFTISRDDARNTVYLQMNSLKPEDTAVYYCNVKIGFIDWIVCEYWGQGTQVTVSS

SEQ ID NO: 11887 - protein, 121 aa, synthetic construct
EVQLVESGGGLVQAGDSLRLSCTASGSVVKMIEMGWFRQAPGKEREFVASISRRWDNTYYADSVKGRFTISRDDARNTVYLQMNSLKPEDTAVYYCNVTVYDSDDGFYEYWGQGTQVTVSS

SEQ ID NO: 11888 - protein, 120 aa, synthetic construct
EVQLVESGGGLVQAGDSLRLSCTASGRAGDCVDMGWFRQAPGKEREFVASISAVHVYTYYADSVKGRFTISRDDARNTVYLQMNSLKPEDTAVYYCNVTVLKLGTFLEYWGQGTQVTVSS

SEQ ID NO: 11889 - protein, 121 aa, synthetic construct
EVQLVESGGGLVQAGDSLRLSCTASGPMIRALEMGWFRQAPGKEREFVASISERLNYTYYADSVKGRFTISRDDARNTVYLQMNSLKPEDTAVYYCNVVSINLLGRIREYWGQGTQVTVSS

SEQ ID NO: 11890 - protein, 120 aa, synthetic construct
EVQLVESGGGLVQAGDSLRLSCTASGIRGSGVEMGWFRQAPGKEREFVASISATRIYTYYADSVKGRFTISRDDARNTVYLQMNSLKPEDTAVYYCNVTCMYTGGFSEYWGQGTQVTVSS

SEQ ID NO: 11891 - protein, 124 aa, synthetic construct
EVQLVESGGGLVQAGDSLRLSCTASGDHAGMLEMGWFRQAPGKEREFVASISFRGAYTYYADSVKGRFTISRDDARNTVYLQMNSLKPEDTAVYYCNVSGIMIHCTFLSVVEYWGQGTQVTVSS

SEQ ID NO: 11892 - protein, 121 aa, synthetic construct
EVQLVESGGGLVQAGDSLRLSCTASGIVRNWLEMGWFRQAPGKEREFVASISVWKNYTYYADSVKGRFTISRDDARNTVYLQMNSLKPEDTAVYYCNVVRIRRDGLIDEYWGQGTQVTVSS

SEQ ID NO: 11893 - protein, 122 aa, synthetic construct
EVQLVESGGGLVQAGDSLRLSCTASGGFADFMEMGWFRQATGKEREFVASISGWTIYTYYADSVKGRFTISRDGARNTVYLQMNSLKPEDTAVYYCNVACVHAPIWNVREYWGQGTQVTVSS

SEQ ID NO: 11894 - protein, 119 aa, synthetic construct
EVQLVESGGGLVQAGDSLRLSCTASGVNPDCMEMGWFRQAPGKEREFVASISTHNTYTYYADSVKGRFTISRDDARNTVYLQMNSLKPEDTAVYYCNVVIWRGGKLEYWGQGTQVTVSS

SEQ ID NO: 11895 - protein, 119 aa, synthetic construct
EVQLVESGGGLVQAGDSLRLSCTASGQVATVMEMGWFRQAPGKEREFVASISGVEVYTYYADSVKGRFTISRDDARNTVYLQMNSLKPEDTAVYYCNVVAIEDTFREYWGQGTQVTVSS

SEQ ID NO: 11896 - protein, 120 aa, synthetic construct
EVQLVESGGGLVQAGDSLRLSCTASGKSSDRVEMGWFRQAPGKEREFVASISRGEVYTYYADSVKGRFTISRDDARNTVYLQMNSLKPEDTAVYYCNVVSVVKGAFKEYWGQGTQVTVSS

SEQ ID NO: 11897 - protein, 117 aa, synthetic construct
EVQLVESGGGLVQAGDSLRLSCTASGISGALMIMGWFRQAPGKEREFVASISGGKGCTYYADSVKGRFTISRDDARNTVYLQMNSLKPEDTAVYYCNVVNNRIREYWGQGTQVTVSS

SEQ ID NO: 11898 - protein, 119 aa, synthetic construct
EVQLVESGGGLVQAGDSLRLSCTASGRMRVIMEMGWFRQAPEKEREFVASISGSTLYTYYADSVKGRFTISRDDARNTVYLQMNSLKPEDTAVYYCNVVGLASRFLEYWGQGTQVTVSS

SEQ ID NO: 11899 - protein, 121 aa, synthetic construct
EVQLVESGGGLVQAGDSLRLSCTASGLNGHRIEMGWFRQAPGKEREFVASISGWSDYTYYADSVKGRFTISRDDARNTVYLQMNSLKPEDTAVYYCNVDCLGLEGHLIEYWGQGTQVTVSS

SEQ ID NO: 11900 - protein, 120 aa, synthetic construct
EVQLVESGGGLVQAGDSLRLSCTASGGRRGVIEMGWFRQAPGKEREFVASISGLSAGTYYADSVKGRFTISRDDARNTVYLQMNSLKPEDTAVYYCNVTALGVRVFMEYWGQGTQVTVSS

SEQ ID NO: 11901 - protein, 119 aa, synthetic construct
EVQLVESGGGLVQAGDSLRLSCTASGLDCRVIEMGWFRQAPGKEREFVASISVSTCYTYYADSVKGRFTISRDDARNTVYLQMNSLKPEDTAVYYCNVVILTTLFSEYWGQGTQVTVSS

SEQ ID NO: 11902 - protein, 121 aa, synthetic construct
EVQLVESGGGLVQAGDSLRLSCTASGIRHLVIEMGWFRQAPGKEREFVASISRGVLYTYYADSVKGRFTISRDDARNTVYLQMNSLKPEDTAVYYCNVMTWLPHSHFEEYWGQGTQVTVSS

SEQ ID NO: 11903 - protein, 120 aa, synthetic construct
EVQLVESGGGLVQAGDSLRLSCTASGVLGDIMEMGWFRQAPGKEREFVASISGRALYTYYADSVKGRFTISRDDARNTVYLQMNSLKPEDTAVYYFNVFIFKMRGAHEYWGQGTQVTVSS

SEQ ID NO: 11904 - protein, 122 aa, synthetic construct
EVQLVESGGGLVQAGDSLRLSCTASGRPETSIDMGWFRQAPGKEREFVASISVTHNGTYYADSVKGRFTISRDDARNTVYLQMNSLKPEDTAVYYCNVTVVNFTQFRFDEYWGQGTQVTVSS

SEQ ID NO: 11905 - protein, 120 aa, synthetic construct
EVQLVESGGGLVQAGDSLRLSCTASGHTENALEMGWFRQAPGKEREFVASISTFQGHTYYADSVKGRFTISRDDARNTVYLQMNSLKPEDTAVYYCNVTIIGSLAFREYWGQGTQVTVSS

SEQ ID NO: 11906 - protein, 119 aa, synthetic construct
EVQLVESGGGLVQAGDSLRLSCTASGNPRVVIEMGWFRQAPGKEREFVASISRGLGYTYYADSVKGRFTISRDDARNTVYLQMNSLKPEDTAVYYCNVWISNGGFREYWGQGTQVTVSS

SEQ ID NO: 11907 - protein, 119 aa, synthetic construct
EVQLVESGGGLVQAGDSLRLSCTASGMHDVIVEMGWFRQAPGKEREFVASISGMKASTYYADSVKGRFTISRDDARNTVYLQMNSLKPEDTAVYYCNVTVFSTTFREYWGQGTQVTVSS

SEQ ID NO: 11908 - protein, 119 aa, synthetic construct
EVQLVESGGGLVQAGDSLRLSCTASGVSMTVGNMGWFRQAPGKEREFVAIYLGAIGTYYADSVKGRFTISRDDARNTVYLQMNSLKPEDTAVYYCNVGRRVRMDWWEYWGQGTQVTVSS

SEQ ID NO: 11909 - protein, 117 aa, synthetic construct
EVQLVESGGGLVQAGDSLRLSCTASGHVGRLVIMGWFRQAPGKEREFVASISGAGNYTYYADSVKGRFTISRDDARNTVYLQMNSLKPEDTAVYYCNVISLRIREYWGQGTQVTVSS

SEQ ID NO: 11910 - protein, 121 aa, synthetic construct
EVQLVESGGGLVQAGDSLRLSCTASGFIQHSIEMGWFRQAPGKEREFVASISVRDLYTYYADSVKGRFTISRDDARNTVYLQMNSLKPEDTAVYYCNVTALDSRGPFTEYWGQGTQVTVSS

SEQ ID NO: 11911 - protein, 118 aa, synthetic construct
EVQLVESGGGLVQAGDSLRLSCTASGVLGVLEMGWFRQAPGKEREFVASISMLEYYTYYADSVKGRFTISRDDARNTVYLQMNSLKPEDTAVYYCNVTYWFGGFVEYWGQGTQVTVSS

SEQ ID NO: 11912 - protein, 119 aa, synthetic construct
EVQLVESGGGLVQAGDSLRLSCTASGNRAPAVEMGWFRQAPGKEREFVASISVRGGYTYYADSVKGRFTISRDDARNTVYLQMNSLKPEDTAVYYCNVTLVSMVIMEYWGQGTQVTVSS

SEQ ID NO: 11913 - protein, 124 aa, synthetic construct
EVQLVESGGGLVQAGDSLRLSCTASGEIMGTIEMGWFRQAPGKEREFVASISERHSYTYYADSVKGRFTISRDDARNTVYLQMNSLKPEDTAVYYCNVTKVLVEGGIIDIHEYWGQGTQVTVSS

SEQ ID NO: 11914 - protein, 119 aa, synthetic construct
EVQLVESGGGLVQAGDSLRLSCTASGDYMGMLEMGWFRQAPGKEREFVASISMIHRWTYYADSVKGRFTISRDDARNTVYLQMNSLKPEDTAVYYCNVTTFVTVFEEYWGQGTQVTVSS

SEQ ID NO: 11915 - protein, 124 aa, synthetic construct
EVQLVESGGGLVQAGDSLRLSCTASGMSRDVIRMGWFRQAPGKEREFVASISEVHVSTYYADSVKGRFTISRDDARNTVYLQMNSLKPEDTAVYYCNVVGLVRSINGTMLVEYWGQGTQVTVSS

SEQ ID NO: 11916 - protein, 119 aa, synthetic construct
EVQLVESGGGLVQAGDSLRLSCTASGSLSNILEMGWFRQAPGKEREFVASISMQGVMTYYADSVKGRFTISRDDARNTVYLQMNSLKPEDTAVYYCNVTIFDILFREYWGQGTQVTVSS

SEQ ID NO: 11917 - protein, 119 aa, synthetic construct
EVQLVESGGGLVQAGDSLRLSCTASGILGTVVEMGWFRQAPGKEREFVASISGASELTYYADSVKGRFTISRDDARNTVYLQMNSLKPEDTAVYYCNVVVIRRVFVEYWGQGTQVTVSS

SEQ ID NO: 11918 - protein, 122 aa, synthetic construct
EVQLVESGGGLVQAGDSLRLSCTASGVCGWVLEMGWFRQAPGKEREFVASISADCSYTYYADSVKGRFTISRDDARNTVYLQMNSLKPEDTAVYYCNVVSVLGFQMVMREYWGQGTQVTVSS

SEQ ID NO: 11919 - protein, 120 aa, synthetic construct
EVQLVESGGGLVQAGDSLRLSCTASGFGYMILEMGWFRQAPGKEREFVASISGTSVYTYYADSVKGRFTISRDDARNTVYLQMNSLKPEDTAVYYCNVLTWTHGSCTEYWGQGTQVTVSS

SEQ ID NO: 11920 - protein, 124 aa, synthetic construct
EVQLVESGGGLVQAGDSLRLSCTASGVVSRVMEMGWFRQAPGKEREFVASISGIGSFTYYADSVKGRFTISRDDARNTVYLQMNSLKPEDTAVYYCNVTLLVLSNSAFRVLEYWGQGTQVTVSS

SEQ ID NO: 11921 - protein, 121 aa, synthetic construct
EVQLVESGGGLVQAGDSLRLSCTASGMIENLIEMGWFRQAPGKEREFVASISSKGGYTYYADSVKGRFTISRDDARNTVYLQMNSLKPEDTAVYYCNVVGLVAFAGFVEYWGQGTQVTVSS

SEQ ID NO: 11922 - protein, 120 aa, synthetic construct
EVQLVESGGGLVQAGDSLRLSCTASGQSVVVIEMGWFRQAPGKEREFVASISGLRTYTYYADSVKGRFTISRDDARNTVYLQMNSLKPEDTAVYYCNVTSCVGVHFKEYWGQGTQVTVSS

SEQ ID NO: 11923 - protein, 120 aa, synthetic construct
EVQLVESGGGLVQAGDSLRLSCTASGRLGVILEMGWFRQAPGKEREFVASISMTSEYTYYADSVKGRFTISRDDARNTVYLQMNSLKPEDTAVYYCNVTSILRGLIKEYWGQGTQVTVSS

SEQ ID NO: 11924 - protein, 118 aa, synthetic construct
EVQLVESGGGLVQAGDSLRLSCTASRTGGAIEMGWFRQAPGKEREFVASISCGNQATYYADSVKGRFTISRDDARNTVYLQMNSLKPEDTAVYYCNVTRLVRHKTEYWGQGTQVTVSS

SEQ ID NO: 11925 - protein, 121 aa, synthetic construct
EVQLVESGGGLVQAGDSLRLSCTASGTHDGILEMGWFRQAPGKEREFVASISEMAMLTYYADSVKGRFTISRDDARNTVYLQMNSLKPEDTAVYYCNVTIWGPSVGFLEYWGQGTQVTVSS

SEQ ID NO: 11926 - protein, 119 aa, synthetic construct
EVQLVESGGGLVQAGDSLRLSCTASGRYSHVVEMGWFRQAPGKEREFVASISGLDQYTYYADSVKGRFTISRDDARNTVYLQMNSLKPEDTAVYYCNVTYLVVAFLEYWGQGTQVTVSS

SEQ ID NO: 11927 - protein, 121 aa, synthetic construct
EVQLVESGGGLVQAGDSLRLSCTASGAGRDIVEMGWFRQAPGKEREFVASISYRGWYTYYADSVKGRFTISRDDARNTVYLQMNSLKPEDTAVYYCNVSGMRPGFMLREYWGQGTQVTVSS

SEQ ID NO: 11928 - protein, 119 aa, synthetic construct
EVQLVESGGGLVQAGDSLRLSCTASGNMGRMLEMGWFRQAPGKEREFVASISTVAVYTYYADSVKGRFTISRDDARNTVYLQMNSLKPEDTAVYYTRISVCVTAFREYWGQGTQVTVSS

SEQ ID NO: 11929 - protein, 124 aa, synthetic construct
EVQLVESGGGLVQAGDSLRLSCTASGVDGRVLEMGWFRQAPGKEREFVASISEWSRYTYYADSVKGRFTISRDDARNTVYLQMNSLKPEDTAVYYCNVLVWAAEIGVRVFREYWGQGTQVTVSS

SEQ ID NO: 11930 - protein, 117 aa, synthetic construct
EVQLVESGGGLVQAGDSLRLSCTASGLNGPIMEMGWFRQAPGKEREFVASISGRTGYTYYADSVKGRFTISRDDARNTVYLQMNSLKPEDTAVYYCNVFFLNMHEYWGQGTQVTVSS

SEQ ID NO: 11931 - protein, 119 aa, synthetic construct
EVQLVESGGGLVQAGDSLRLSCTASGTICEMLEMGWFRQAPGKEREFVASISMILRYTYYADSVKGRFTISRDDARNTVYLQMNSLKPEDTAVYYCNVTVLDRRFFEYWGQGTQVTVSS

SEQ ID NO: 11932 - protein, 121 aa, synthetic construct
EVQLVESGGGLVQAGDSLRLSCTASGINGQLVEMGWFRQAPGKEREFVASISGRTWATYYADSVKGRFTISRDDARNTVYLQMNSLKPEDTAVYYCNVTTFDVHDFFEEYWGQGTQVTVSS

SEQ ID NO: 11933 - protein, 119 aa, synthetic construct
EVQLVESGGGLVQAGDSLRLSCTASGGGNWLIEMGWFRQAPGKEREFVASISVRYDVTYYADSVKGRFTISRDDARNTVYLQMNSLKPEDTAVYYCNVTTFKDGFVEYWGQGTQVTVSS

SEQ ID NO: 11934 - protein, 119 aa, synthetic construct
EVQLVESGGGLVQAGDSLRLSCTASGLENSIEMGWFRQAPGKEREFVASISMRYVYTYYADSVKGRFTISRDDARNTVYLQMNSLKPEDTAVYYCNVLIVNTSHVREYWGQGTPVTVSS

SEQ ID NO: 11935 - protein, 122 aa, synthetic construct
EVQLVESGGGLVQAGDSLRLSCTASGTRFVFVCMGWFRQAPGKEREFVASISGFGHITYYADSVKGRFTISRDDARNTVYLQMNSLKPEDTAVYYCNVDRVNERFVQHVEYWGQGTQVTVSS

SEQ ID NO: 11936 - protein, 120 aa, synthetic construct
EVQLVESGGGLVQAGDSLRLSCTASGLSDHVVEMGWFRQAPGKEREFVASISGVSMYTYYADSVKGRFTISRDDARNTVYLQMNSLKPEDTAVYYCNVILIRVHMFREYWGQGTQVTVSS

SEQ ID NO: 11937 - protein, 122 aa, synthetic construct
EVQLVESGGGLVQAGDSLRLSCTASGAHGVVVDMGWFRQAPGKEREFVASISSHGLLTYYADSVKGRFTISRDDARNTVYLQMNSLKPEDTAVYYCNVTTMCHSNHRFMEYWGQGTQVTVSS

SEQ ID NO: 11938 - protein, 119 aa, synthetic construct
EVQLVESGGGLVQAGDSLRLSCTASGGSDNALEMGWFRQAPGKEREFVASISQVGTYTYYADSVKGRFTISRDDARNTVYLQMNSLKPEDTAVYYCNVVVLRRVFIEYWGQGTQVTVSS

SEQ ID NO: 11939 - protein, 121 aa, synthetic construct
EVQLVESGGGLVQAGDSLRLSCTASGKPREVLEMGWFRQAPGKEREFVASISAKSGLTYYADSVKGRFTISRDDARNTVYLQMNSLKPEDTAVYYCNVTVWSMQRLFSEYWGQGTQVTVSS

SEQ ID NO: 11940 - protein, 120 aa, synthetic construct
EVQLVESGGGLVQAGDSLRLSCTASGGYGAVVEMGWFRQAPGKEREFASSISGRNAGTYYADSVKGRFTISRDDARNTVYLQMNSLKPEDTAVYYCNVTAVALAKFCEYWGQGTQVTVSS

SEQ ID NO: 11941 - protein, 119 aa, synthetic construct
EVQLVESGGGLVQAGDSLRLSCTASGNNSVIMEMGWFRQAPGKEREFVASISMGNVYTYYADSVKGRFTISRDDARNTVYLQMNSLKPEDTAVYYCNVVVVTHEFVEYWGQGTQVTVSS

SEQ ID NO: 11942 - protein, 120 aa, synthetic construct
EVQLVESGGGLVQAGDSLRLSCTASGQNGKSIEMGWFRQAPGKEREFVASISVHGMYTYYADSVKGRFTISRDDARNTVYLQMNSLKPEDTAVYYCNVSCFDVMGVREYWGQGTQVTVSS

SEQ ID NO: 11943 - protein, 125 aa, synthetic construct
EVQLVESGGGLVQAGDSLRLSCTASGQLESVMEMGWFRQAPGKEREFVASISGKGGYTYYADSVKGRFTISRDDARNTVYLQMNSLKPEDTAVYYCNVTLWTMLVRVAARLCEYWGQGTQVTVSS

SEQ ID NO: 11944 - protein, 120 aa, synthetic construct
EVQLVESGGGLVQAGDSLRLSCTASGMMGIRVEMGWFRQAPGKEREFVASISGLSKDTYYADSVKGRFTISRDDARNTVYLQMNSLKPEDTAVYYCNVTVFSSHVFYEYWGQGTQVTVSS

SEQ ID NO: 11945 - protein, 120 aa, synthetic construct
EVQLVESGGGLVQAGDSLRLSCTASGHIARALEMGWFRQAPGKEREFVASISVRESVTYYADSVKGRFTISRDDARNTVYLQMNSLKPEDTAVYYCNVVVVGRTMFKEYWGQGTQVTVSS

SEQ ID NO: 11946 - protein, 120 aa, synthetic construct
EVQLVESGGGLVQAGDSLRLSCTASGRLGGAVEMGWFRQAPGKEREFVASISGVKWYTYYADSVKGRFTISRDDARNTVYLQMNSLKPEDTAVYYCNVTALVKNVFCEYWGQGTQVTVSS

SEQ ID NO: 11947 - protein, 124 aa, synthetic construct
EVQLVESGGGLVQAGDSLRLSCTASGVAGTLLEMGWFRQAPGKEREFVASISCRGNGTYYADSVKGRFTISRDDARNTVYLQMNSLKPEDTAVYYCNVTCWGGVVSDIPFREYWGQGTQVTVSS

SEQ ID NO: 11948 - protein, 120 aa, synthetic construct
EVQLVESGGGLVQAGDSLRLSCTASGVLGDTLELGWFRQAPGKEREFVASISRANNETYYADSVKGRFTISRDDARNTVYLQMNSLKPEDTAVYYCNVTSISGGRFHEYWGQGTQVTVSS

SEQ ID NO: 11949 - protein, 120 aa, synthetic construct
EVQLVESGGGLVQAGDSLRLSCTASGEGFIEIIMGWFRQAPGKEREFVASISQRMAVTYYADSVKGRFTISRDDARNTVYLQMNSLKPEDTAVYYCNVLVIDRYTFHEYWGQGTQVTVSS

SEQ ID NO: 11950 - protein, 122 aa, synthetic construct
EVQLVESGGGLVQAGDSLRLSCTASGWNGLVLEMGWFRQAPGKEREFVASISGARHYTYYADSVKGRFTISRDDARNTVYLQMNSLKPEDTAVYYCNVSCFIMAVQEFVEYWGQGTQVTVSS

SEQ ID NO: 11951 - protein, 120 aa, synthetic construct
EVQLVESGGGLVQAGDSLRLSCTASGFGVVIEMGWFRQAPGKEREFVASISGIGSYTYYADSVKGRFTISRDDARNTVYLQMNSLKPEDTAVYYCNVIRLSAIFGFMEYWGQGTQVTVSS

SEQ ID NO: 11952 - protein, 120 aa, synthetic construct
EVQLVESGGGLVQAGDSLRLSCTASGAHVLVIEMGWFRQAPGKEREFVASISGTGAYTYYADSVKGRFTISRDDARNTVYLQMNSLKPEDTAVYYCNVSMLHVGLLVEYWGQGTQVTVSS

SEQ ID NO: 11953 - protein, 120 aa, synthetic construct
EVQLVESGGGLVQAGDSLRLSCTASGDPWIVVEMGWFRQAPGKEREFVASISGVSAYTYYADSVKGRFTISRDDARNTVYLQMNSLKPEDTAVYYCNVGGFVDGRFREYWGQGTQVTVSS

SEQ ID NO: 11954 - protein, 120 aa, synthetic construct
EVQLVESGGGLVQAGDSLRLSCTASGLKKVWMEMGWFRQAPGKEREFVASISESKVYTYYADSVKGRFTISRDDARNTVYLQMNSLKPEDTAVYYCNVTVVGSMRIMEYWGQGTQVTVSS

SEQ ID NO: 11955 - protein, 120 aa, synthetic construct
EVQLVESGGGLVQAGDSLRLSCTASGRWTNVIGMGWFRQAPGKEREFVASISMRDDFTYYADSVKGRFTISRDDARNTVYLQMNSLKPEDTAVYYCNVTSVSNVGFHEYWGQGTQVTVSS

SEQ ID NO: 11956 - protein, 121 aa, synthetic construct
EVQLVESGGGLVQAGDSLRLSCTASGLMAGWSEMGWFRQAPGKEREFVASISVTGTYTYYADSVKGRFTISRDDARNTVYLQMNSLKPEDTAVYYCNVTWLDETYRKREYWGQGTQVTVSS

SEQ ID NO: 11957 - protein, 120 aa, synthetic construct
EVQLVESGGGLVQAGDSLRLSCTASGRLGFALEMGWFRQAPGKEREFVASISMVGAITYYADSVKGRFTISRDDARNTVYLQMNSLKPEDTAVYYCNVTVLEAIHFIKYWGQGTQVTVSS

SEQ ID NO: 11958 - protein, 120 aa, synthetic construct
EVQLVESGGGLVQAGDSLRLSCTASGRDDNGLEMGWFRQAPGKEREFVASISLRGTYTYYADSVKGRFTISRDDARNTVYLQMNSLKPEDTAVYYCNVSSFFAPRLYEYWGQGTQVTVSS

SEQ ID NO: 11959 - protein, 120 aa, synthetic construct
EVQLVESGGGLVQAGDSLRLSCTASGFRGYAVEMGWFRQAPGKEREFVASISDWQEYTYYADSVKGRFTISRDDARNTVYLQMNSLKPEDTAVYYCNVTTLFNATFFEYWGQGTQVTVSS

SEQ ID NO: 11960 - protein, 121 aa, synthetic construct
EVQLVESGGGLVQAGDSLRLSCTASGRWGVVVEMGWFRQAPGKEREFVASISGNMRYTYYADSVKGRFTISRDDARNTVYLQMNSLKPEDTAVYYCNVVMMSTDGRFNEYWGQGTQVTVSS

SEQ ID NO: 11961 - protein, 121 aa, synthetic construct
EVQLVESGGGLVQAGDSLRLSCTASGLFNLVMEMGWFRQAPGKEREFVASISRGGRYTYYADSVKGRFTISRDDARNTVYLQMNSLKPEDTAVYYCNVVEWGNVGGFKEYWGQGTQVTVSS

SEQ ID NO: 11962 - protein, 123 aa, synthetic construct
EVQLVESGGGLVQAGDSLRLSCTASGQICPVLEMGWFRQAPGKEREFVASISGVSVYTYYADSVKGRFTISRDDARNTVYLQMNSLKPEDTAVYYCNVVVLDGVDRMGFREYWGQGTQVTVSS

SEQ ID NO: 11963 - protein, 119 aa, synthetic construct
EVQLVESGGGLVQAGDSLRLSCTASGRVGLLLEMGWFRQAPGKEREFVASISGRGDYTYYADSVKGRFTISRDDARNTVYLQMNSLKPEDTAVYYCNVVTVEWMVKEYWGQGTQVTVSS

SEQ ID NO: 11964 - protein, 119 aa, synthetic construct
EVQLVESGGGLVQAGDSLRLSCTASGATVVRRYMGWFRQAPGKEREFVASISVLGRETYYADSVKGRFTISRDDARNTVYLQMNSLKPEDTAVYYCNVMWGVHVMFEYWGQGTQVTVSS

SEQ ID NO: 11965 - protein, 121 aa, synthetic construct
EVQLVESGGGLVQAGDSLRLSCTASGNMDVRVEMGWFRQAPGKEREFVASISGNKRGTYYADSVKGRFTISRDDARNTVYLQMNSLKPEDTAVYYCNVWDYVVTRGFVEYWGQGTQVTVSS

SEQ ID NO: 11966 - protein, 120 aa, synthetic construct
EVQLVESGGGLVQAGDSLRLSCTASGSGIVVIEMGWFRQAPGKEREFVASISGAGLYTYYADSVKGRFTISRDDARNTVYLQMNSLKPEDTAVYYCNVTVVRCNRISEYWGQGTQVTVSS

SEQ ID NO: 11967 - protein, 121 aa, synthetic construct
EVQLVESGGGLVQAGDSLRLSCTASGRYCQAMEMGWFRQAPGKEREFVASISVRDGITYYADSVKGRFTISRDDARNTVYLQMNSLKPEDTAVYYCNVTGVSPGCGFREYWGQGTQVTVSS

SEQ ID NO: 11968 - protein, 120 aa, synthetic construct
EVQLVESGGGLVQAGDSLRLSCTASGDCMILIEMGWFRQAPGKEREFVASISMQRQYTYYADSVKGRFTISRDDARNTVYLQMNSLKPEDTAVYYCNVSQLGSHGFVEYWGQGTQVTVSS

SEQ ID NO: 11969 - protein, 119 aa, synthetic construct
EVQLVESGGGLVQAGDSLRLSCTASGHATGSLEMGWFRQAPGKEREFVASISFTCVYTYYADSVKGRFTISRDDARNTVYLQMNSLKPEDTAVYYCNVSVMSRGIREYWGQGTQVTVSS

SEQ ID NO: 11970 - protein, 120 aa, synthetic construct
EVQLVESGGGLVQAGDSLRLSCTASGGTRDWVEMGWFRQAPGKEREFVASISFSSAYTYYADSVKGRFTISRDDARNTVYLQMNSLKPEDTAVYYCNVTVIVVNGFGEYWGQGTQVTVSS

SEQ ID NO: 11971 - protein, 120 aa, synthetic construct
EVQLVESGGGLVQAGDSLRLSCTASGPDCNKVEMGWFRQAPGKEREFVASISAQTGYTYYADSVKGRFTISRDDARNTVYLQMNSLKPEDTAVYYCNVVCFTSRGFNEYWGQGTQVTVSS

SEQ ID NO: 11972 - protein, 124 aa, synthetic construct
EVQLVESGGGLVQAGDSLRLSCTASGMEQGIIEMGWFRQAPGKEREFVASISGTGMYTYYADSVKGRFTISRDDARNTVYLQMNSLKPEDTAVYYCNVEGLRRAVDRWSFVEYWGQGTQVTVSS

SEQ ID NO: 11973 - protein, 121 aa, synthetic construct
EVQLVESGGGLVQAGDSLRLSCTASGVSEGQLEMGWFRQAPGKEREFVASISMRADYTYYADSVKGRFTISRDDARNTVYLQMNSLKPEDTAVYYCNVTGFGVASRWIEYWGQGTQVTVSS

SEQ ID NO: 11974 - protein, 120 aa, synthetic construct
EVQLVESGGGLVQAGDSLRLSCTASGDGGVCFEMGWFRQAPGKEREFVASISGEHSYTYYADSVKGRFTISRDDARNTVYLQMNSLKPEDTAVYYCNVTTYNFHGFKEYWGQGTQVTVSS

SEQ ID NO: 11975 - protein, 119 aa, synthetic construct
EVQLVESGGGLVQAGDSLRLSCTASGSVTGLLEMGWFRQAPGKEREFVASISGRNLYTYYADSVKGRFTISRDDARNTVYLQMNSLKPEDTAVYYCNVTVFRGELTEYWGQGTQVTVSS

SEQ ID NO: 11976 - protein, 120 aa, synthetic construct
EVQLVESGGGLVQAGDSLRLSCTASGHGVRFIEMGWFRQAPGKEREFVASISMQNEYTYYADSVKGRFTISRDDARNTVYLQMNSLKPEDTAVYYCNVASIANTFFVEYWGQGTQVTVSS

SEQ ID NO: 11977 - protein, 122 aa, synthetic construct
EVQLVESGGGLVQAGDSLRLSCTASGRTSVVLEMGWFRQAPGKEREFVASISGLATYTYYADSVKGRFTISRDDARNTVYLQMNSLKPEDTAVYYCNVTVVIVDKGTVVEYWGQGTQVTVSS

SEQ ID NO: 11978 - protein, 122 aa, synthetic construct
EVQLVESGGGLVQAGDSLRLSCTASGIDDVKVEMGWFRQAPGKEREFVASISARNDYTYYADSVKGRFTISRDDARNTVYLQMNSLKPEDTAVYYCNVVTFCAKSGKILEYWGQGTQVTVSS

SEQ ID NO: 11979 - protein, 124 aa, synthetic construct
EVQLVESGGGLVQAGDSLRLSCTARGHAPRVVEMGWFRQAPGKEREFVASISGRTAYTYYADSVKGRFTISRDDARNTVYLQMNSLKPEDTAVYYCNVVEAYMSQDGYAFIEYWGQGTQVTVSS

SEQ ID NO: 11980 - protein, 117 aa, synthetic construct
EVQLVESGGGLVQAGDSLRLSCTASGKVAELIIMGWFRQAPGKEREFVASISGVVKYTYYADSVKGRFTISRDDARNTVYLQMNSLKPEDTAVYYCNVVTSRIREYWGQGTQVTVSS

SEQ ID NO: 11981 - protein, 123 aa, synthetic construct
EVQLVESGGGLVQAGDSLRLSCTASGDRRTALEMGWFRQAPGKEREFVASISGRTVYTYYADSVKGRFTISRDDARNTVYLQMNSLKPEDTAVYYCNVTLLDVQGTRALREYWGQGTQVTVSS

SEQ ID NO: 11982 - protein, 122 aa, synthetic construct
EVQLVESGGGLVQAGDSLRLSCTASGSDGVRLEMGWFRQAPGKEREFVASISMHRITTYYADSVKGRFTISRDDARNTVYLQMNSLKPEDTAVYYCNVTCWKQSGWRFVEYWGQGTQVTVSS

SEQ ID NO: 11983 - protein, 120 aa, synthetic construct
EVQLVESGGGLVQAGDSLRLSCTASGMRENRIEMGWFRQAPGKEREFVASISMRYRMTYYADSVKGRFTISRDDARNTVYLQMNSLKPEDTAVYYCNVTTVTNFHFFEYWGQGTQVTVSS

SEQ ID NO: 11984 - protein, 119 aa, synthetic construct
EVQLVESGGGLVQAGDSLRLSCTASGVNSVVVEMGWFRQAPGKEREFVASISGWGVMTYYADSVKGRFTISRDDARNTVYLQMNSLKPEDTAVYYCNVTAITNKFVEYWGQGTQVTVSS

SEQ ID NO: 11985 - protein, 122 aa, synthetic construct
EVQLVESGGGLVQAGDSLRLSCTASGGYLEMGWFRQAPGKEREFVASISGHNDYTYYADSVKGRFTISRDDARNTVYLQMNSLKPEDTAVYYCNVTDIFLQSSSNLVFREYWGQGTQVTVSS

SEQ ID NO: 11986 - protein, 117 aa, synthetic construct
EVQLVESGGGLVQAGDSLRLSCTASGSLERSLFMGWFRQAPGKEREFVASIMLDAWTYYADSVKGRFTISRDDARNTVYLQMNSLKPEDTAVYYCNVLIMGDMFEYWGQGTQVTVSS

SEQ ID NO: 11987 - protein, 121 aa, synthetic construct
EVQLVESGGGLVQAGDSLRLSCTASGEIGVILEMGWFRQAPGKEREFVASISGFHNVTYYADSVKGRFTISRDDARNTVYLQMNSLKPEDTAVYYCNVVACVCVLRSPEYWGQGTQVTVSS

SEQ ID NO: 11988 - protein, 117 aa, synthetic construct
EVQLVESGGGLVQAGDSLRLSCTASGDVGDLMEMGWFRQAPGKEREFVASISVRNVYTYYADSVKGRFTISRDDARNTVYLQMNSLKPEDTAVYYCNVLSMCLREYWGQGTQVTVSS

SEQ ID NO: 11989 - protein, 119 aa, synthetic construct
EVQLVESGGGLVQAGDSLRLSCTASGCCGRKLEMGWFRQAPGKEREFVASISVEAEYTYYADSAKGRFTISRDDARNTVYLQMNSLKPEDTAVYYCNVLAFNRVFCEYWGQGTQVTVSS

SEQ ID NO: 11990 - protein, 122 aa, synthetic construct
EVQLVESGGGLVQAGDSLRLSCTASGQNRRTIEMGWFRQAPGKEREFVASISGNGTYTYYADSVKGRFTISRDDARNTVYLQMNSLKPEDTAVYYCNVLVVIGIKFAIREYWGQGTQVTVSS

SEQ ID NO: 11991 - protein, 124 aa, synthetic construct
EVQLVESGGGLVQAGDSLRLSCTASGSVSLAAIMGWFRQAPGKEREFVASISGLGVGTYYADSVKGRFTISRDDARNTVYLQMNSLKPEDTAVYYCNVVRSWVYWCCGLMDEYWGQGTQVTVSS

SEQ ID NO: 11992 - protein, 122 aa, synthetic construct
EVQLVESGGGLVQAGDSLRLSCTASGVGSGTLEMGWFRQAPGKEREFVASISVHCGYTYYADSVKGRFTISRDDARNTVYLQMNSLKPEDTAVYYCRHTILSCVHNRIGEYWGQGTQVTVSS

SEQ ID NO: 11993 - protein, 121 aa, synthetic construct
EVQLVESGGGLVQAGDSLRLSCTASGIGGSIMEMGWFRQAPGKEREFVASISGRSSYTYYADSVKGRFTISRDDARNTVYLQMNSLKPEDTAVYYCNVDILPGGGLIEEYWGQGTQVTVSS

SEQ ID NO: 11994 - protein, 120 aa, synthetic construct
EVQLVESGGGLVQAGDSLRLSCTASGCAMYVIEMGWFRQAPGKEREFVASISRQILYTYYADSVKGRFTISRDDARNTVYLQMNSLKPEDTAVYYCNVLTVHGMRVEEYWGQGTQVTVSS

SEQ ID NO: 11995 - protein, 121 aa, synthetic construct
EVQLVESGGGLVQAGDSLRLSCTASGMLGTLVDMGWFRQAPGKEREFVASISGRGNYTYYADSVKGRFTISRDDARNTVYLQMNSLKPEDTAVYYCNVVTVSRDAGFIEYWGQGTQVTVSS

SEQ ID NO: 11996 - protein, 120 aa, synthetic construct
EVQLVESGGGLVQAGDSLRLSCTASGRVCHVIEMGWFRQAPGKEREFVASISGHAIYTYYADSVKGRFTISRDDARNTVYLQMNSLKPEDTAVYYCNVLSVQADGIREYWGQGTQVTVSS

SEQ ID NO: 11997 - protein, 111 aa, synthetic construct
EVQLVESGGGLVQAGDSLRLSCTASGHVNDYIMMGWFRQAPGKEREFVAVIINGDNTYYADSVKGRFTISRDDARNTVYLQMNSLKPEDTAVYYCNVMEYWGQGTQVTVSS

SEQ ID NO: 11998 - protein, 121 aa, synthetic construct
EVQLVESGGGLVQAGDSLRLSCTASGAPGRMIEMGWFRQAPGKEREFVASISGWGSYTYYADSVKGRFTISRDDARNTVYLQMNSLKPEDTAVYYCNVVLMKTDFDLIEYWGQGTQVTVSS

SEQ ID NO: 11999 - protein, 120 aa, synthetic construct
EVQLVESGGGLVQAGDSLRLSCTASGKNAMSIEMGWFRQAPGKEREFVASISCNWTYTYYADSVKGRFTISRDDARNTVYLQMNSLKPEDTAVYYCNVTKFKDLRFVEYWGQGTQVTVSS

SEQ ID NO: 12000 - protein, 123 aa, synthetic construct
EVQLVESGGGLVQAGDSLRLSCTASGHRNQVLEMGWFRQAPGKEREFVASISLGLDYTYYADSVKDRFTISRDDARNTVYLQMNSLKPEDTAVYYCNVTAISYDVRPFFDEYWGQGTQVTVSS

SEQ ID NO: 12001 - protein, 120 aa, synthetic construct
EVQLVESGGGLVQAGDSLRLSCTASGSVRTVWSMGWFRQAPGKEREFVASISGMIDFTYYADSVKGRFTISRDDARNTVYLQMNSLKPEDTAVYYCNVIVAGIWEDGEYWGQGTQVTVSS

SEQ ID NO: 12002 - protein, 120 aa, synthetic construct
EVQLVESGGGLVQAGDSLRLSCTASGRCGMTLEMGWFRQAPGKEREFVASISNGMTYTYYADSVKGRFTISRDDARNTVYLQMNSLKPEDTAVYYCNVTAVVRWGIIEYWGQGTQVTVSS

SEQ ID NO: 12003 - protein, 121 aa, synthetic construct
EVQLVESGGGLVQAGDSLRLSCTASGGACRILEMGWFRQAPGKEREFVASISWGGSYTYYADSVKGRFTISRDDARNTVYLQMNSLKPEDTAVYYGNVVECGVNIRFTEYWGQGTQVTVSS

SEQ ID NO: 12004 - protein, 117 aa, synthetic construct
EVQLVESGGGLVQAGDSLRLSCTASGDAAHVLEMGWFRQAPGKEREFVASISWRAEYTYYADSVKGRFTISRDDARNTVYLQMNSLKPEDTAVYYCNVTSIPKREYWGQGTQVTVSS

SEQ ID NO: 12005 - protein, 120 aa, synthetic construct
EVQLVESGGGLVQAGDSLRLSCTASGLFGLEGQMGWFRQAPGKEREFVASISNGIDTTYYADSVKGRFTISRDDARNTVYLQMNSLKPEDTAVYYCNVVGFLARLFREYWGQGTQVTVSS

SEQ ID NO: 12006 - protein, 121 aa, synthetic construct
EVQLVESGGGLVQAGDSLRLSCTASGVAVKVIEMGWFRQAPGKEREFVASISGARTYTYYADSVKGRFTISRDDARNTVYLQMNSLKPEDTAVYYCNVTVVSGDYMFSEYWGQGTQVTVSS

SEQ ID NO: 12007 - protein, 120 aa, synthetic construct
EVQLVESGGGLVQAGDSLRLSCTASGIEGFQLGMGWFRQAPGKEREFVASISTLVADTYYADSVKGRFTISRDDARNTVYLQMNSLKPEDTAVYYCNVTMFSVRKFIEYWGQGTQVTVSS

SEQ ID NO: 12008 - protein, 120 aa, synthetic construct
EVQLVESGGGLVQAGDSLRLSCTASGKCARIIEMGWFRQAPGKEREFVASISGGGIGTYYADSVKGRFTISRDDARNTVYLQMNSLKPEDTAVYYCNVTSFSAMSFGEYWGQGTQVTVSS

SEQ ID NO: 12009 - protein, 120 aa, synthetic construct
EVQLVESGGGLVQAGDSLRLSCTASGLKAQFIEMGWFRQAPGKEREFVASISGMHDYTYYADSVKGRFTISRDDARNTVYLQMNSLKPEDTAVYYCNVVALGKASIVEYWGQGTQVTVSS

SEQ ID NO: 12010 - protein, 112 aa, synthetic construct
EVQLVESGGGLVQAGDSLRLSCTASGSIDAGIWMGWFRQAPGKEREFVAVTFGLARTYYADSVKGRFTISRDDARNTVYLQMNSLKPEDTAVYYCNVDGEYWGQGTQVTVSS

SEQ ID NO: 12011 - protein, 115 aa, synthetic construct
EVQLVESGGGLVQAGDSLRLSCTASGPMLEILEMGWFRQAPGKEREFVAVTFGGRGTYYADSVKGRFTISRDDARNTVYLQMNSLKPEDTAVYYCNVRNCREEYWGQGTQVTVSS

SEQ ID NO: 12012 - protein, 117 aa, synthetic construct
EVQLVESGGGLVQAGDSLRLSCTASGNREDSIEMGWFRQAPGKEREFVASISSVRGYTYYADSVKGRFTISRDDARNTVYLQMNSLKPEDTAVYYCNVTGVTFREYWGQGTQVTVSS

SEQ ID NO: 12013 - protein, 120 aa, synthetic construct
EVQLVESGGGLVQAGDSLRLSCTASGTTDDSSEMGWFRQAPGKEREFVASISVRWAYTYYADSVKGRFTISRDDARNTVYLQMNSLKPEDTAVYYCNVRTRAGMGCDEYWGQGTQVTVSS

SEQ ID NO: 12014 - protein, 119 aa, synthetic construct
EVQLVESGGGLVQAGDSLRLSCTASGNVRGMIEMGWFRQAPGKEREFVASISARGDYTYYADSVKGRFTISRDDARNTVYLQMNSLKPEDTAVYYCNVVLFWAVLAEYWGQGTQVTVSS

SEQ ID NO: 12015 - protein, 118 aa, synthetic construct
EVQLVESGGGLVQAGDSLRLSCTASGYRIVFNEMGWFRQAPGKEREFVASISGFLGLTYYADSVKGRFTISRDDARNTVYLQMNSLKPEDTAVYYCNVLGVADLDEYWGQGTQVTVSS

SEQ ID NO: 12016 - protein, 120 aa, synthetic construct
EVQLVESGGGLVQAGDSLRLSCTASGDDRTIMEMGWFRQAPGKEREFVASISGLGEYTYYADSVKGRFTISRDDARNTVYLQMNSLKPEDTAVYYCNVVSLVFSNFVEYWGQGTQVTVSS

SEQ ID NO: 12017 - protein, 121 aa, synthetic construct
EVQLVESGGGLVQAGDSLRLSCTASGPRCIIIEMGWFRQAPGKEREFVASISGRDVHTYYADSVKGRFTISRDDARNTVYLQMNSLKPEDTAVYYCNVTGLLRDCSFVEYWGQGTQVTVSS

SEQ ID NO: 12018 - protein, 124 aa, synthetic construct
EVQLVESGGGLVQAGDSLRLSCTASGSMGWMIEMGWFRQAPGKEREFVASISGRGKYTYYADSVKGRFTISRDDARNTVYLQMNSLKPEDTAVYYCNVSRLRVFEADMKIEEYWGQGTQVTVSS

SEQ ID NO: 12019 - protein, 122 aa, synthetic construct
EVQLVESGGGLVQAGDSLRLSCTASGGIGVGLEMGWFRQAPGKEREFVASISVREVYTYYADSVKGRFTISRDDARNTVYLQMNSLKPEDTAVYYCNVTVWAEDFRRVWEYWGQGTQVTVSS

SEQ ID NO: 12020 - protein, 120 aa, synthetic construct
EVQLVESGGGLVQAGDSLRLSCTASGIRGGVLEMGWFRQAPGKEREFVASISRRSNYTYYADSVKGRFTISRDDARNTVYLQMNSLKPEDTAVYYCNVVICITGFFMEYWGQGTQVTVSS

SEQ ID NO: 12021 - protein, 124 aa, synthetic construct
EVQLVESGGGLVQAGDSLRLSCTASGMFEAAVEMGWFRQAPGKEREFVASISSHQAYTYYADSVKGRFTISRDDARNTVYLQMNSLKPEDTAVYYCNVTVIHGQGMWAHFTEYWGQGTQVTVSS

SEQ ID NO: 12022 - protein, 124 aa, synthetic construct
EVQLVESGGGLVQAGDSLRLSCTASGVTGWVLEMGWFRQAPGKEREFVASISGTHAYTYYADSVKGRFTISRDDARNTVYLQMNSLKPEDTAVYYCNVVHMVHVGVRIVFGEYWGQGTQVTVSS

SEQ ID NO: 12023 - protein, 121 aa, synthetic construct
EVQLVESGGGLVQAGDSLRLSCTASGSKRIVVEMGWFRQAPGKEREFVASISGRETYTYYADSVKGRFTISRDDARNTVYLQMNSLKPEDTAVYYCNVVVLGVQSGFQEYWGQGTQVTVSS

SEQ ID NO: 12024 - protein, 122 aa, synthetic construct
EVQLVESGGGLVQAGDSLRLSCTASGRRFVFCGMGWFRQAPGKEREFVASISGYQSSTYYADSVKGRFTISRDDARNTVYLQMNSLKPEDTAVYYCNVMVGETGITLVTEYWGQGTQVTVSS

SEQ ID NO: 12025 - protein, 120 aa, synthetic construct
EVQLVESGGGLVQAGDSLRLSCTASGVMNQILEMGWFRQAPGKEREFVASISGTKKYTYYADSVKGRFTISRDDARNTVYLQMNSLKPEDTAVYYCNVVILQSRAFIEYWGQGTQVTVSS

SEQ ID NO: 12026 - protein, 120 aa, synthetic construct
EVQLVESGGGLVQAGDSLRLSCTASGIDKGGLEMGWFRQAPGKEREFVASISVSQGFTYYADSVKGRFTISRDDARNTVYLQMNSLKPEDTAVYYCNVSVFDLGRFGEYWGQGTQVTVSS

SEQ ID NO: 12027 - protein, 123 aa, synthetic construct
EVQLVESGGGLVQAGDSLRLSCTASGMTYDVGAMGWFRQAPGKEREFVASISMIVNFTYYADSVKGRFTISRDDARNTVYLQMNSLKPEDTAVYYCNVVPKWVIGPGVQFEYWGQGTQVTVSS

SEQ ID NO: 12028 - protein, 121 aa, synthetic construct
EVQLVESGGGLVQAGDSLRLSCTASGNGWWVLEMGWFRQAPGKEREFVASISGHSYFTYYADSVKGRFTISRDDARNTVYLQMNSLKPEDTAVYYCNVTGVIGVRGFVEYWGQGTQVTVSS

SEQ ID NO: 12029 - protein, 117 aa, synthetic construct
EVQLVESGGGLVQAGDSLRLSCTASGCIGRVLEMGWFRQAPGKEREFVASISGYNSYTYYADSVKGRFTISRDDARNTVYLQMNSLKPEDTAVYYCNVLLTTCREYWGQGTQVTVSS

SEQ ID NO: 12030 - protein, 120 aa, synthetic construct
EVQLVESGGGLVQAGDSLRLSCTASGHMITVVEMGWFRQAPGKEREFVASISGKHVNTYYADSVKGRFTISRDDARNTVYLQMNSLKPEDTAVYHCNVTAFKEAGFLEYWGQGTQVTVSS

SEQ ID NO: 12031 - protein, 117 aa, synthetic construct
EVQLVESGGGLVQAGDSLRLSCTASGHILASYWMGWFRQAPGKEREFVASISIIVPGTYYADSVKGRFTISRDDARNTVYLQMNSLKPEDTAVYYCNVKTFRDVEYWGQGTQVTVSS

SEQ ID NO: 12032 - protein, 120 aa, synthetic construct
EVQLVESGGGLVQAGDSLRLSCTASGGGRLMVEMGWFRQAPGKEREFVASISTSMDYTYYADSVKGRFTISRDDARNTVYLQMNSLKPEDTAVYYCNVVGLKEFMFLEYWGQGTQVTVSS

SEQ ID NO: 12033 - protein, 120 aa, synthetic construct
EVQLVESGGGLVQAGDSLRLSCTASGARLVFIDMGWFRQAPGKEREFVASISVVHGGTYYADSVKGRFTISRDDARNTVYLQMNSLKPEDTAVYYCNVTAFGYARFYEYWGQGTQVTVSS

SEQ ID NO: 12034 - protein, 121 aa, synthetic construct
EVQLVESGGGLVQAGDSLRLSCTASGGAYVTIEMGWFRQAPGKEREFVASISGVTEYTYYADSVKGRFTISRDDARNTVYLQMNSLKPEDTAVYYCNVAAITEGWRLQEYWGQGTQVTVSS

SEQ ID NO: 12035 - protein, 119 aa, synthetic construct
EVQLVESGGGLVQAGDSLRLSCTASGDIVGCVEMGWFRQAPGKEREFVASISKVMGYTYYADSVKGRFTISRDDARNTVYLQMNSLKPEDTAVYYCNVTAVTILIWEYWGQGTQVTVSS

SEQ ID NO: 12036 - protein, 119 aa, synthetic construct
EVQLVESGGGLVQAGDSLRLSCTASGFRVVFIAMGWFRQAPGKEREFVASISGFREKTYYADSVKGRFTISRDDARNTVYLQMNSLKPEDTAVYYCNVDVPVDVLGEYWGQGTQVTVSS

SEQ ID NO: 12037 - protein, 121 aa, synthetic construct
EVQLVESGGGLVQAGDSLRLSCTASGQVMVTLEMGWFRQAPGKEREFVASISGQSAYTYYADSVKGRFTISRDDARNTVYLQMNSLKPEDTAVYYCNVTCQKATGSFYEYWGQGTQVTVSS

SEQ ID NO: 12038 - protein, 121 aa, synthetic construct
EVQLVESGGGLVQAGDSLRLSCTASGKMRKVLEMGWFRQAPGKEREFVASISGDMAYTYYADSVKGRFTISRDDARNTVYLQMNSLKPEDTAVYYCNVTTLVIAGWLEEYWGQGTQVTVSS

SEQ ID NO: 12039 - protein, 123 aa, synthetic construct
EVQLVESGGGLVQAGDSLRLSCTASGNIYADWDMGWFRQAPGKEREFVASISVWARCTYYADSVKGRFTISRDDARNTVYLQMNSLKPEDTAVYYCNVGRVLPTAYVDIMEYWGQGTQVTVSS

SEQ ID NO: 12040 - protein, 121 aa, synthetic construct
EVQLVESGGGLVQAGDSLRLSCTASALGEGMLEMGWFRQAPGKEREFVASISRMRQYTYYADSVKGRFTISRDDARNTVYLQMNSLKPEDTAVYYCNVTVFIDLKGINEYWGQGTQVTVSS

SEQ ID NO: 12041 - protein, 119 aa, synthetic construct
EVQLVESGGGLVQAGDSLRLSCTASGRWVMEMGWFRQAPGKEREFVASISIVGSRTYYADSVKGRFTISRDDARNTVYLQMNSLKPEDTAVYYCNVTTWDVVEGFGEYWGQGTQVTVSS

SEQ ID NO: 12042 - protein, 117 aa, synthetic construct
EVQLVESGGGLVQAGDSLRLSCTASGNVKGVLEMGWFRQAPGKEREFVASISRPHVYTYYADSVKGRFTISRDDARNTVYLQMNSLKPEDTAVYYCNVTTTHFVEYWGQGTQVTVSS

SEQ ID NO: 12043 - protein, 120 aa, synthetic construct
EVQLVESGGGLVQAGDSLRLSCTASGVIYSVIEMGWFRQAPGKEREFVASISARHGVTYYADSVKGRFTISRDDARNTVYLQMNSLKPEDTAVYYCNVTALTTVNFREYWGQGTQVTVSS

SEQ ID NO: 12044 - protein, 120 aa, synthetic construct
EVQLVESGGGLVQAGDSLRLSCTASGRVMNIFEMGWFRQAPGKEREFVASISGRSRYTYYADSVKGRFTISRDDARNTVYLQMNSLKPEDTAVYYCNVVLWLATGFGEYWGQGTQVTVSS

SEQ ID NO: 12045 - protein, 121 aa, synthetic construct
EVQLVESGGGLVQAGDSLRLSCTASGSLNMIMEMGWFRQAPGKEREFVASISHMQIYTYYADSVKGRFTISRDDARNTVYLQMNSLKPEDTAVYYCNVVEVSRTMLLREYWGQGTQVTVSS

SEQ ID NO: 12046 - protein, 122 aa, synthetic construct
EVQLVESGGGLVQAGDSLRLSCTASGVGAEIVEMGWFRQAPGKEREFVASISGSWGTTYYADSVKGRFTISRDDARNTVYLQMNSLKPEDTAVYYCNVTHWGYLVGRFTEYWGQGTQVTVSS

SEQ ID NO: 12047 - protein, 120 aa, synthetic construct
EVQLVESGGGLVQAGDSLRLSCTASGMLAQVIEMGWFRQAPGKEREFVASISGIVLSTYYADSVKGRFTISRDDARNTVYLQMNSLKPEDTAVYYCNVTACDAMGFDEYWGQGTQVTVSS

SEQ ID NO: 12048 - protein, 120 aa, synthetic construct
EVQLVESGGGLVQAGDSLRLSCTASGMQSALLEMGWFRQAPGKEREFVASISFATQYTYYADSVKGRFTISRDDARNTVYLQMNSLKPEDTAVYYCNVVHVHMGTFIEYWGQGTQVTVSS

SEQ ID NO: 12049 - protein, 118 aa, synthetic construct
EVQLVESGGGLVQAGDSLRLSCTASGQWTVFEGMGWFRQAPGMEREFVASISGFHSVTYYADSVEGRFTISRDDARNTVYLQMNSLKPEDTAVYYCNVGEDNRVVEYWGQGTQVTVSS

SEQ ID NO: 12050 - protein, 121 aa, synthetic construct
EVQLVESGGGLVQAGDSLRLSCTASGDVRAGLEMGWFRQAPGKEREFVASISWNGPYTYYADSVKGRFTISRDDARNTVYLQMNSLKPEDTAVYYCNVTVFYVVMGIGEYWGQGTQVTVSS

SEQ ID NO: 12051 - protein, 119 aa, synthetic construct
EVQLVESGGGLVQAGDSLRLSCTASGGRIVFRHMGWFRQAPGKEREFVASISGFNANTYYADSVKGRFTISRDDARNTVYLQMNSLKPEDTAVYYCNVEPYDVFEPEYWGQGTQVTVSS

SEQ ID NO: 12052 - protein, 121 aa, synthetic construct
EVQLVESGGGLVQAGDSLRLSCTASGMQGLVLEMGWFRQAPGKEREFVASISGLGVYTYYADSVKGRFTISRDDARNTVYLQMNSLKPEDTAVYYCNVTIFSDVGIKIEYWGQGTQVTVSS

SEQ ID NO: 12053 - protein, 121 aa, synthetic construct
EVQLVESGGGLVQAGDSLRLSCTASGINAIIVEMGWFRQAPGKEREFVASISGQSRYTYYADSVKGRFTISRDDARNTVYLQMNSLKPEDTAVYYCNVFVLAHGRGGVEYWGQGTQVTVSS

SEQ ID NO: 12054 - protein, 119 aa, synthetic construct
EVQLVESGGGLVQAGDSLRLSCTASGMMGRVLEMGWFRQAPGKEREFVASISVCSDYTYYADSVKGRFTISRDDARNTVYLQMNSLKPEDTAVYYCNVVSVLAKFREYWGQGTQVTVSS

SEQ ID NO: 12055 - protein, 120 aa, synthetic construct
EVQLVESGGGLVQAGDSLRLSCTASGWRFHVLAMDWFRQAPGKEREFVASISGTGVYTYYADSVKGRFTISRDDARNTVYLQMNSLKPEDTAVYYCNVLRVEFGSIAEYWGQGTQVTVSS

SEQ ID NO: 12056 - protein, 120 aa, synthetic construct
EVQLVESGGGLVQAGDSLRLSCTASGSNTHVVEMGWFRQAPGKEREFVASISARCGYTYYADSVKGRFTISRDDARNTVYLQMNSLKPEDTAVYYCNVVTNVNVGFVEYWGQGTQVTVSS

SEQ ID NO: 12057 - protein, 120 aa, synthetic construct
EVQLVESGGGLVQAGDSLRLSCTASGLGDHVLEMGWFRQAPGKEREFVASISGTGHYTYYADSVKGRFTISRDDARNTVYLQMNSLKPEDTAVYYCNVVIVNRHRILEYWGQGTQVTVSS

SEQ ID NO: 12058 - protein, 120 aa, synthetic construct
EVQLVESGGGLVQAGDSLRLSCTASGKYTNVVEMGWFRQAPGKEREFVASISGHAHDTYYADSVKGRFTISRDDARNTVYLQMNSLKPEDTAVYYCNVTCIVAVLVREYWGQGTQVTVSS

SEQ ID NO: 12059 - protein, 120 aa, synthetic construct
EVQLVESGGGLVQAGDSLRLSCTASGLSDIILEMGWFRQAPGKEREFVASISSSCTYTYYADSVKGRFTISRDDARNTVYLQMNSLKPEDTAVYYCNVTNFHRYRIVEYWGQGTQVTVSS

SEQ ID NO: 12060 - protein, 120 aa, synthetic construct
EVQLVESGGGLVQAGDSLRLSCTASGRRLVVLEMGWFRQAPGKEREFVASISVQRVGTYYADSVKGRFTISRDDARNTVYLQMNSLKPEDTAVYYCNVTVVGVREFVEYWGQGTQVTVSS

SEQ ID NO: 12061 - protein, 121 aa, synthetic construct
EVQLVESGGGLVQAGDSLRLSCTASGVRGLGIDMGWFRQAPGKEREFVASISVLHHMTYYADSVKGRFTISRDDARNTVYLQMNSLKPEDTAVYYCNVTTFLKDVGFIEYWGQGTQVTVSS

SEQ ID NO: 12062 - protein, 121 aa, synthetic construct
EVQLVESGGGLVQAGDSLRLSCTASGNLGEVLEMGWFRQAPGKEREFAASISGRTVWTYYADSVKGRFTISRDDARNTVYLQMNSLKPEDTAVYYCNVTELVMHRCLVEYWGQGTQVTVSS

SEQ ID NO: 12063 - protein, 120 aa, synthetic construct
EVQLVESGGGLVQAGDSLRLSCTASGNTISLMEMGWFRQAPGKEREFVASISVVAQYTYYADSVKGRFTISRDDARNTVYLQMNSLKPEDTAVYYCNVSALGFDGFCEYWGQGTQVTVSS

SEQ ID NO: 12064 - protein, 118 aa, synthetic construct
EVQLVESGGGLVQAGDSLRLSCTASGLVRGMVVMGWFRQAPGKEREFVASISVWDVHTYYADSVKGRFTISRDDARNTVYLQMNSLKPEDTAVYYCNVLVLAGWCEYWGQGTQVTVSS

SEQ ID NO: 12065 - protein, 122 aa, synthetic construct
EVQLVESGGGLVQAGDSLRLSCTASGDRSGLMEMGWFRQAPGKEREFVASISVNYKVTYYADSVKGRFTISRDDARNTVYLQMNSLKPEDTAVYYCNVTAFNWVDGFFCEYWGQGTQVTVSS

SEQ ID NO: 12066 - protein, 119 aa, synthetic construct
EVQLVESGGGLVQAGDSLRLSCTASGCRGTMVEMGWFRQAPGKEREFVASISDRGEYTYYADSVKGRFTISRDDARNTVYLQMNSLKPEDTAVYYCNVTTISHNVNEYWGQGTQVTVSS

SEQ ID NO: 12067 - protein, 120 aa, synthetic construct
EVQLVESGGGLVQAGDSLRLSCTASGPYKAGMEMGWFRQAPGKEREFVASISLANMYTYYADSVKGRFTISRDDARNTVYLQMNSLKPEDTAVYYCNVTCLDFRLLVEYWGQGTQVTVSS

SEQ ID NO: 12068 - protein, 121 aa, synthetic construct
EVQLVESGGGLVQAGDSLRLSCTASGIVGGLMEMGWFRQAPGKEREFVASISASRWVTYYADSVKGRFTISRDDARNTVYLQMNSLKPEDTAVYYCNVTLFDPHIGKAEYWGQGTQVTVSS

SEQ ID NO: 12069 - protein, 119 aa, synthetic construct
EVQLVESGGGLVQAGDSLRLSCTASGIKNLDSYMGWFRQAPGKEREFVASISVKWLVTYYADSVKGRFTISRDDARNTVYLQMNSLKPEDTAVYYCNVNVWCRGMEEYWGQGTQVTVSS

SEQ ID NO: 12070 - protein, 120 aa, synthetic construct
EVQLVESGGGLVQAGDSLRLSCTASGVADFVVEMGWFRQAPGKEREFVASISGYGMLTYYADSVKGRFTISRDDARNTVYLQMNSLKPEDTAVYYCNVTILDIRGFQEYWGQGTQVTVSS

SEQ ID NO: 12071 - protein, 121 aa, synthetic construct
EVQLVESGGGLVQAGDSLRLSCTASGSSGGMVEMGWFRQAPGKEREFVASISTGVTYTYYADSVKGRFTISRDDARNTVYLQMNSLKPEDTAVYYCNVTGVHCIWGIVEYWGQGTQVTVSS

SEQ ID NO: 12072 - protein, 121 aa, synthetic construct
EVQLVESGGGLVQAGDSLRLSCTASGTDRVMIEMGWFRQAPGKEREFVASISGSHTYTYYADSVKGRFTISRDDARNTVYLQMNSLKPEDTAVYYCNVVVIMDGMTFIEYWGQGTQVTVSS

SEQ ID NO: 12073 - protein, 119 aa, synthetic construct
EVQLVESGGGLVQAGDSLRLSCTASGVGLMAIEMGWFRQAPGKEREFVASISVRENYTYYADSVKGRFTISRDDARNTVYLQMNSLKPEDTAVYYCNLTYVIRGIQEYWGQGTQVTVSS

SEQ ID NO: 12074 - protein, 118 aa, synthetic construct
EVQLVESGGGLVQAGDSLRLSCTASGPRDGLVEMGWFRQAPGKEREFVASISGFGHDTYYADSVKGRFTISRDDARNTVYLQMNSLKPEDTAVYYCNVLVSAGIIEYWGQGTQVTVSS

SEQ ID NO: 12075 - protein, 121 aa, synthetic construct
EVQLVESGGGLVQAGDSLRLSCTASGRRTVFMGMGWFRQAPGKEREFVASISGFKGGTYYADSVKGRFTISRDDARNTVYLQMNSLKPEDTAVYYCNVADDMGRNAVWEYWGQGTQVTVSS

SEQ ID NO: 12076 - protein, 120 aa, synthetic construct
EVQLVESGGGLVQAGDSLRLSCTASGVQGIRIEMGWFRQAPGKEREFVASISGVTTRTYYADSVKGRFTISRDDARNTVYLQMNSLKPEDTAVYYCNVTTWQDGLFGEYWGQGTQVTVSS

SEQ ID NO: 12077 - protein, 120 aa, synthetic construct
EVQLVESGGGLVQAGDSLRLSCTASGIRNTRIEMGWFRQAPGKEREFVASISCSREYTYYADSVKGRFTISRDDARNTVYLQMNSLKPEDTAVYYCNVTCLAGNVLVEYWGQGTQVTVSS

SEQ ID NO: 12078 - protein, 117 aa, synthetic construct
EVQLVESGGGLVQAGDSLRLSCTASGEMRGMLEMGWFRRAPGKEREFVASISGFHGCTYYADSVKGRFTISRDDARNTVYLQMNSLKPEDTAVYYCNVVPVVDVEYWGQGTQVTVSS

SEQ ID NO: 12079 - protein, 120 aa, synthetic construct
EVQLVESGGGLVQAGDSLRLSCTASGELKDHLEMGWFRQAPGKEREFVASISRSEVYTYYADSVKGRFTISRDDARNTVYLQMNSLKPEDTAVYYCNVTLGRFGKFVEYWGQGTQVTVSS

SEQ ID NO: 12080 - protein, 118 aa, synthetic construct
EVQLVESGGGLVQAGDSLRLSCTASGMTETGFRMGWFRQAPGKEREFVASISEEQVFTYYADSVKGRFTISRDDARNTVYLQMNSLKPEDTAVYYCNVLIFRHWIEYWGQGTQVTVSS

SEQ ID NO: 12081 - protein, 121 aa, synthetic construct
EVQLVESGGGLVQAGDSLRLSCTASGEGLRILEMGWFRQAPGKEREFVASISGQGDNTYYADSVKGRFTISRDDARNTVYLQMNSLKPEDTAVYYCNVTHFDVRIGVREYWGQGTQVTVSS

SEQ ID NO: 12082 - protein, 120 aa, synthetic construct
EVQLVESGGGLVQAGDSLRLSCTASGDAREMMEMGWFRQAPGKEREFVASISRSYDYTYYADSVKGRFTISRDDARNTVYLQMNSLKPEDTAVYYVFVVGFLVGAVIEYWGQGTQVTVSS

SEQ ID NO: 12083 - protein, 120 aa, synthetic construct
EVQLVESGGGLVQAGDSLRLSCTASGPIGVRLEMGWFRQAPGKEREFVASISGTVVYTYYADSVKGRFTISRDDARNTVYLQMNSLKPEDTAVYYCNVCALSVCGFVEYWGQGTQVTVSS

SEQ ID NO: 12084 - protein, 121 aa, synthetic construct
EVQLVESGGGLVQAGDSLRLSCTASGIDDVIVEMGWFRQAPGKEREFVASISGLGTSTYYADSVKGRFTISRDDARNTVYLQMNSLKPEDTAVYYCNVTGLSCNYSFMEYWGQGTQVTVSS

SEQ ID NO: 12085 - protein, 117 aa, synthetic construct
EVQLVESGGGLVQAGDSLRLSCTASGVVGVLMIMGWFRQAPGKEREFVASISGIASRTYYADSVKGRFTISRDDARNTVYLQMNSPKPEDTAVYYCNVVTDRIVEYWGQGTQVTVSS

SEQ ID NO: 12086 - protein, 120 aa, synthetic construct
EVQLVESGGGLVQAGDSLRLSCTASGTQGMIVEMGWFRQAPGKEREFVASISARGVFTYYADSVKGRFTISRDDARNTVYLQMNSLKPEDTAVYYCNVTVLGDGSFIEYWGQGTQVTVSS

SEQ ID NO: 12087 - protein, 117 aa, synthetic construct
EVQLVESGGGLVQAGDSLRLSCTASGSIADVLEMGWFRQAPGKEREFVASISAIGCYTYYADSVKGRFTISRDDARNTVYLQMNSLKPEDTAVYYCNVTSDRFFEYWGQGTQVTVSS

SEQ ID NO: 12088 - protein, 120 aa, synthetic construct
EVQLVESGGGLVQAGDSLRLSCTASGVVGHGLEMGWFRQAPGKEREFVASISMLRIYTYYADSVKGRFTISRDDARNTVYLQMNSLKPEDTAVYYCNVTALSISGRHEYWGQGTQVTVSS

SEQ ID NO: 12089 - protein, 123 aa, synthetic construct
EVQLVESGGGLVQAGDSLRLSCTASGLVTMPMEMGWFRQAPGKEREFVASISCQKAYTYYADSVKGRFTISRDDARNTVYLQMNSLKPEDTAVYYCNVMVVFEMVSWTIREYWGQGTQVTVSS

SEQ ID NO: 12090 - protein, 121 aa, synthetic construct
EVQLVESGGGLVQAGDSLRLSCTASGADGCFLEMGWFRQAPGKEREFVASISGNYAYTYYADSVKGRFTISRDDARNTVYLQMNSLKPEDTAVYYCNVTSMTPLGRVREYWGQGTQVTVSS

SEQ ID NO: 12091 - protein, 123 aa, synthetic construct
EVQLVESGGGLVQAGDSLRLSCTASGSYIAFVGMGWFRQAPGKEREFVASISWDWSTTYYADSVKGRFTISRDDARNTVYLQMNSLKPEDTAVYYCNVIDVSVVGQIIQDEYWGQGTQVTVSS

SEQ ID NO: 12092 - protein, 123 aa, synthetic construct
EVQLVESGGGLVQAGDSLRLSCTASGVSCFLVEMGWFRQAPGKEREFVASISGTGTCTYYADSVKGRFTISRDDARNTVYLQMNSLKPEDTAVYYCNVTGWYNNLVPAFREYWGQGTQVTVSS

SEQ ID NO: 12093 - protein, 119 aa, synthetic construct
EVQLVESGGGLVQAGDSLRLSCTASGISGNFVEMGWFRQAPGKEREFVASISGGVLYTYYADSVKGRFTISRDDARNTVYLQMNSLKPEDTAVYYCNVTVLWVGVREYWGQGTQVTVSS

SEQ ID NO: 12094 - protein, 122 aa, synthetic construct
EVQLVESGGGLVQAGDSLRLSCTASGLTVVVVEMGWFRQAPGKEREFVASISGSGTYTYYADSVKGRFTISRDDARNTVYLQMNSLKPEDTAVYYCNVTGVARYRGTISEYWGQGTQVTVSS

SEQ ID NO: 12095 - protein, 119 aa, synthetic construct
EVQLVESGGGLVQAGDSLRLSCTASGPVTRYMEMGWFRQAPGKEREFVASISYNGNYTYYADSVKGRFTISRDDARNTVYLQMNSLKPEDTAVYYCNVVMYINVFIEYWGQGTQVTVSS

SEQ ID NO: 12096 - protein, 119 aa, synthetic construct
EVQLVESGGGLVQAGDSLRLSCTASGLSGHVLEMGWFRQAPGKEREFVASISGKNGCTYYADSVKGRFTISRDDARNTVYLQMNSLKPEDTAVYYCNVTISNRGFSEYWGQGTQVTVSS

SEQ ID NO: 12097 - protein, 120 aa, synthetic construct
EVQLVESGGGLVQAGDSLRLSCTASGASGNWLEMGWFRQAPGKEREFVASISGVRLYTYYADSVKGRFTISRDDARNTVYLQMNSLKPEDTAVYYCNVGNWVRQGYMEYWGQGTQVTVSS

SEQ ID NO: 12098 - protein, 120 aa, synthetic construct
EVQLVESGGGLVQAGDSLRLSCTASGINRGILEMGWFRQAPGKEREFVASISTVGTYTYYADSVKGRFTISRDDARNTVYLQMNSLKPEDTAVYYCNVCAVSVHDFKEYWGQGTQVTVSS

SEQ ID NO: 12099 - protein, 117 aa, synthetic construct
EVQLVESGGGLVQAGDSLRLSCTASGDCYRSIVMGWFRQAPGKEREFVASISTRYMDTYYADSVKGRFTISRDDARNTVYLQMNSLKPEDTAVYYCNVLMWSWVEYWGQGTQVTVSS

SEQ ID NO: 12100 - protein, 124 aa, synthetic construct
EVQLVESGGGLVQAGDSLRLSCTASGANKECVEMGWFRQAPGKEREFVASISGRSRYTYYADSVKGRFTISRDDARNTVYLQMNSLKPEDTAVYYCNVVFAVMREKLVWFTEYWGQGTQVTVSS

SEQ ID NO: 12101 - protein, 120 aa, synthetic construct
EVQLVESGGGLVQAGDSLRLSCTASGRIRLVIEMGWFRQAPGKEREFVASISGIRLETYYADSVKGRFTISRDDARNTVYLQMNSLKPEDTAVYYCNVTSLGIRNFDEYWGQGTQVTVSS

SEQ ID NO: 12102 - protein, 117 aa, synthetic construct
EVQLVESGGGLVQAGDSLRLSCTASGNMKRMLEMGWFRQAPGKEREFVASISMVVNYTYYADSVKGRFTISRDDARNTVYLQMNSLKPEDTAVYYCNVTTEVFIEYWGQGTQVTVSS

SEQ ID NO: 12103 - protein, 120 aa, synthetic construct
EVQLVESGGGLVQAGDSLRLSCTASGWDDNGVDMGWFRQAPGKEREFVASISKVQGYTYYADSVKGRFTISRDDARNTVYLQMNSLKPEDTAVYYCNVTMHVRSRFLEYWGQGTQVTVSS

SEQ ID NO: 12104 - protein, 121 aa, synthetic construct
EVQLVESGGGLVQAGDSLRLSCTASGVEGRVVEMGWFRQAPGKEREFVASISGLAAYTYYADSVKGRFTISRDDARNTVYLQMNSLKPEDTAVYYCNVTVVRPVPGFQEYWGQGTQVTVSS

SEQ ID NO: 12105 - protein, 119 aa, synthetic construct
EVQLVESGGGLVQAGDSLRLSCTASGKVNDVVEMGWFRQAPGKEREFVASISSGTRYTYYADSVKGRFTISRDDARNTVYLQMNSLKPEDTAVYYCNVWVFVRGFLEYWGQGTQVTVSS

SEQ ID NO: 12106 - protein, 120 aa, synthetic construct
EVQLVESGGGLVQAGDSLRLSCTASGTVGLVVEMGWFRQAPGKEREFVASISKNALYTYYADSVKGRFTISRDDARNTVYLQMNSLKPEDTAVYYCNVTSMWRVTVMEYWGQGTQVTVSS

SEQ ID NO: 12107 - protein, 119 aa, synthetic construct
EVQLVESGGGLVQAGDSLRLSCTASGRIRSVMEMGWFRQAPGKEREFVASISGIKYGTYYADSVKGRFTISRDDARNTVYLQMNSLKPEDTAVYYCNVTQFEGRKIEYWGQGTQVTVSS

SEQ ID NO: 12108 - protein, 122 aa, synthetic construct
EVQLVESGGGLVQAGDSLRLSCTASGGTDRRLEMGWFRQAPGKEREFVASISERNGLTYYADSVKGRFTISRDDARNTVYLQMNSLKPEDTAVYYCNVVVIDQARWAFLEYWGQGTQVTVSS

SEQ ID NO: 12109 - protein, 121 aa, synthetic construct
EVQLVESGGGLVQAGDSLRLSCTASGLTGLIVEMGWFRQAPGKEREFVASISGNNAYTYYADSVKGRFTISRDDARNTVYLQMNSLKPEDTAVYYCNVLVVLGTGMIVEYWGQGTQVTVSS

SEQ ID NO: 12110 - protein, 120 aa, synthetic construct
EVQLVESGGGLVQAGDSLRLSCTASGIVDVVIEMGWFRQAPGKEREFVASISGYRFATYYADSVKGRFTISRDDARNTVYLQMNSLKPEDTAVYYCNVCTFTKHDFLEYWGQGTQVTVSS

SEQ ID NO: 12111 - protein, 120 aa, synthetic construct
EVQLVESGGGLVQAGDSLRLSCTASGTVSGLVEMGWFRQAPGKEREFVASISGRTTDTYYADSVKGRFTISRDDARNTVYLQMNSLKPEDTAVYYCNVTLIYGQKFEEYWGQGTQVTVSS

SEQ ID NO: 12112 - protein, 117 aa, synthetic construct
EVQLVESGGGLVQAGDSLRLSCTASGIVSKVLEMGWFRQAPGKEREFVASISGSRSYTYYADSVKGRFTISRDDARNTVYLQMNSLKPEDTAVYYCNVTSGEFKEYWGQGTQVTVSS

SEQ ID NO: 12113 - protein, 119 aa, synthetic construct
EVQLVESGGGLVQAGDSLRLSCTASGVNGGFTHMGWFRQAPGKEREFVASISWYRYVTYYADSVNGRFTISRDDARNTVYLQMNSLKPEDTAVYYCNVMIFASTFEEYWGQGTQVTVSS

SEQ ID NO: 12114 - protein, 119 aa, synthetic construct
EVQLVESGGGLVQAGDSLRLSCTASGPIGFVIEMGWFRQAPGKEREFVASISGVTEGTYYADSVKGRFTISRDDARNTVYLQMNSLKPEDTAVYYCNVVVFDMGFEEYWGQGTQVTVSS

SEQ ID NO: 12115 - protein, 117 aa, synthetic construct
EVQLVESGGGLVQAGDSLRLSCTASGHMNDVIVMGWFRQAPGKEREFVASISSALSYTYYADSVKGRFTISRDDARNTVYLQMNSLKPEDTAVYYCNVLDKKWNEYWGQGTQVTVSS

SEQ ID NO: 12116 - protein, 119 aa, synthetic construct
EVQLVESGGGLVQAGDSLRLSCTASGDVIVFTPMGWFRQAPGKEREFVASISGFRGVTYYADSVKGRFTISRDDARNTVYLQMNSLKPEDTAVYYCNVVGLRAPKVEYWGQGTQVTVSS

SEQ ID NO: 12117 - protein, 117 aa, synthetic construct
EVQLVESGGGLVQAGDSLRLSCTASGTAPLLEMGWFRQAPGKEREFVASISVRVRYTYYADSVKGRFTISRDDARNTVYLQMNSLKPEDTAVYYCNVVSVDRFLEYWGQGTQVTVSS

SEQ ID NO: 12118 - protein, 123 aa, synthetic construct
EVQLVESGGGLVQAGDSLRLSCTASDLTFFMEMGWFRQAPGKEREFVASISFTGLYTYYADSVKGRFTISRDDARNTVYLQMNSLKPEDTAVYYCNVSVWVNGNMSRGIREYWGQGTQVTVSS

SEQ ID NO: 12119 - protein, 121 aa, synthetic construct
EVQLVESGGGLVQAGDSLRLSCTASGNLCSIIEMGWFRQAPGKEREFVASISRLGGYTYYADSVKGRFTISRDDARNTVYLQMNSLKPEDTAVYYCNVTELLRMEGIHEYWGQGTQVTVSS

SEQ ID NO: 12120 - protein, 121 aa, synthetic construct
EVQLVESGGGLVQAGDSLRLSCTASGFMVVFNGMGWFRQAPGKEREFVASISGFGLNTYYADSVKGRFTISRDDARNTVYLQMNSLKPEDTAVYYCNVTEHLSRVHKWEYWGQGTQVTVSS

SEQ ID NO: 12121 - protein, 119 aa, synthetic construct
EVQLVESGGGLVQAGDSLRLSCTASGKVRDRGRMGWFRQAPGKEREFVASISIEVDTTYYADSVKGRFTISRDDARNTVYLQMNSLKPEDTAVYYCNVLLITRVWREYWGQGTQVTVSS

SEQ ID NO: 12122 - protein, 120 aa, synthetic construct
EVQLVESGGGLVQAGDSLRLSCTASGLGSIVIEMGWFRQAPGKEREFVASISKIGCETYYADSVKGRFTISRDDARNTVYLQMNSLKPEDTAVYYCNVTMWSGVAFSEYWGQGTQVTVSS

SEQ ID NO: 12123 - protein, 125 aa, synthetic construct
EVQLVESGGGLVQAGDSLRLSCTASGNYVNGWSMGWLRQAPGKEREFVASISVPCGRTYYADSVKGRFTISRDDARNTVYLQMNSLKPEDTAVYYCNVKGFCSLYDMSAGWQEYWGQGTQVTVSS

SEQ ID NO: 12124 - protein, 120 aa, synthetic construct
EVQLVESGGGLVQAGDSLRLSCTASGLAALALEMGWFRQAPGKEREFVASISGNKAETYYADSVKGRFTISRDDARNTVYLQMNSLKPEDTAVYYCNVTTHVGRGFQEYWGQGTQVTVSS

SEQ ID NO: 12125 - protein, 125 aa, synthetic construct
EVQLVESGGGLVQAGDSLRLSCTASGRNVAVTDMGWFRQAPGKEREFVASISGASLATYYADSVKGRFTISRDDARNTVYLQMNSLKPEDTAVYYCNVVWVVVIKGIIFHMIEYWGQGTQVTVSS

SEQ ID NO: 12126 - protein, 121 aa, synthetic construct
EVQLVESGGGLVQAGDSLRLSCTASGIDHTIVEMGWFRQAPGKEREFVASISGTRHYTYYADSVKGRFTISRDDARNTVYLQMNSLKPEDTAVYYCNVTAFVDGVYLFEYWGQGTQVTVSS

SEQ ID NO: 12127 - protein, 119 aa, synthetic construct
EVQLVESGGGLVQAGDSLRLSCTASGGRQGPLEMGWFRQAPGKEREFVASISGSEEYTYYADSVKGRFTISRDDARNTVYLQMNSLKPEDTAVYYCNVVYFAGRFIEYWGQGTQVTVSS

SEQ ID NO: 12128 - protein, 125 aa, synthetic construct
EVQLVESGGGLVQAGDSLRLSCTASGSDVVMMEMGWFRQAPGKEREFVASISGRTDYTYYADSVKGRFTISRDDARNTVYLQMNSLKPEDTAVYYCNVTVVTVADGKQVALKEYWGQGTQVTVSS

SEQ ID NO: 12129 - protein, 120 aa, synthetic construct
EVQLVESGGGLVQAGDSLRLSCTASGGGASILEMGWFRQAPGKEREFVASISVPGLSTYYADSVKGRFTISRDDARNTVYLQMNSLKPEDTAVYYCNVTVHHLACFREYWGQGTQVTVSS

SEQ ID NO: 12130 - protein, 120 aa, synthetic construct
EVQLVESGGGLVQAGDSLRLSCTASGQMRMLMEMGWFRQAPGKEREFVASISARSAATYYADSVKGRFTISRDDARNTVYLQMNSLKPEDTAVYYCNVTVFGGMLKSEYWGQGTQVTVSS

SEQ ID NO: 12131 - protein, 118 aa, synthetic construct
EVQLVESGGGLVQAGDSLRLSCTASGGGIGYRSMGWFRQAPGKEREFVASIITVLRTYYADSVKGRFTISRDDARNTVYLQMNSLKPEDTAVYYCNLCWGTIGLGEYWGQGTQVTVSS

SEQ ID NO: 12132 - protein, 120 aa, synthetic construct
EVQLVESGGGLVQAGDSLRLSCTASGSSASYVEMGWFRQAPGKEREFVASISGLADYTYYADSVKGRFTISRDDARNTVYLQMNSLKPEDTAVYYCNVTVCMHMGFGEYWGQGTQVTVSS

SEQ ID NO: 12133 - protein, 120 aa, synthetic construct
EVQLVESGGGLVQAGDSLRLSCTASGCMNGVMEMGWFRQAPGKEREFVASISAHVAYTYYADSVKGRFTISRDDARNTVYLQMNSLKPEDTAVYYCNVTCLVNMSRDEYWGQGTQVTVSS

SEQ ID NO: 12134 - protein, 120 aa, synthetic construct
EVQLVESGGGLVQAGDSLRLSCTASGKHAGVLEMGWFRQAPGKEREFVASISANCEYTYYADSVKGRFTISRDDARNTVYLQMNSLKPEDTAVYYCNVTVVNLNGIREYWGQGTQVTVSS

SEQ ID NO: 12135 - protein, 121 aa, synthetic construct
EVQLVESGGGLVQAGDSLRLSCTASGHLTTVIEMGWFRQAPGKEREFVASISGFHSATYYADSVKGRFTISRDDARNTVYLQMNSLKPEDTAVYYCNVLRELHGGDDSEYWGQGTQVTVSS

SEQ ID NO: 12136 - protein, 121 aa, synthetic construct
EVQLVESGGGLVQAGDSLRLSCTASGGRRGVVEMGWFRQAPGKEREFVASISVRNVYTYYADSVKGRFTISRDDARNTVYLQMNSLKPEDTAVYYCNVCSVDPVDGFREYWGQGTQVTVSS

SEQ ID NO: 12137 - protein, 121 aa, synthetic construct
EVQLVESGGGLVQAGDSLRLSCTASGSGGRVLEMGWFRQAPGKEREFVASISNRGIYTYYADSVKGRFTISRDDARNTVYLQMNSLKPEDTAVYYCNVVVLGRQGRFLEYWGQGTQVTVSS

SEQ ID NO: 12138 - protein, 121 aa, synthetic construct
EVQLVESGGGLVQAGDSLRLSCTASGKAKVVLEMGWFRQAPGKEREFVASISGVGTYTYYADSVKGRFTISRDDARNTVYLQMNSLKPEDTAVYYCNVFCFVRGRGGIEYWGQGTQVTVSS

SEQ ID NO: 12139 - protein, 122 aa, synthetic construct
EVQLVESGGGLVQAGDSLRLSCTASGNVNYLLEMGWFRQAPGKEREFVASISGFGNATYYADSVKGRFTISRDDARNTVYLQMNSLKPEDTAVYYCNVGPGLEGFTMGGEYWGQGTQVTVSS

SEQ ID NO: 12140 - protein, 120 aa, synthetic construct
EVQLVESGGGLVQAGDSLRLSCTASGCANRSGEMGWFRQAPGKEREFVASISMSRTYTYYADSVKGRFTISRDDARNTVYLQMNSLKPEDTAVYYCNVTVVGSCWIREYWGQGTQVTVSS

SEQ ID NO: 12141 - protein, 119 aa, synthetic construct
EVQLVESGGGLVQAGDSLRLSCTASGSSVRIIEMGWFRQAPGKEREFVASISGRGTYTYYADSVKGRFTISRDDARNTVYLQMNSLKPEDTAVYYCNVTFYVVVFGEYWGQGTQVTVSS

SEQ ID NO: 12142 - protein, 121 aa, synthetic construct
EVQLVESGGGLVQAGDSLRLSCTASGDHRSFLEMGWFRQAPGKEREFVASISMQVNYTYYADSVKGRFTISRDDARNTVYLQMNSLKPEDTAVYYCNVVIVTTGRRFLEYWGQGTQVTVSS

SEQ ID NO: 12143 - protein, 124 aa, synthetic construct
EVQLVESGGGLVQAGDSLRLSCTASGNLHVILEMGWFRQAPGKEREFVASISNNQMYTYYADSVKGRFTISRDDARNTVYLQMNSLKPEDTAVYYCNVTSLVHSCGSLELGEYWGQGTQVTVSS

SEQ ID NO: 12144 - protein, 122 aa, synthetic construct
EVQLVESGGGLVQAGDSLRLSCTASGLRDGLVEMGWFRQAPGKEREFVASISGRLVLTYYADSVKGRFTISRDDARNTVYLQMNSLKPEDTAVYYCNVTVFSKRVLAFEEYWGQGTQVTVSS

SEQ ID NO: 12145 - protein, 124 aa, synthetic construct
EVQLVESGGGLVQAGDSLRLSCTASGSAVGFIEMGWFRQAPGKEREFVASISRVSAYTYYADSVKGRFTISRDDARNTVYLQMNSLKPEDTAVYYCNVTNVLRKNGLLYFMEYWGQGTQVTVSS

SEQ ID NO: 12146 - protein, 121 aa, synthetic construct
EVQLVESGGGLVQAGDSLRLSCTASGKMSSMLEMGWFRQAPGKEREFVASISGYRMITYYADSVKGRFTISRDDARNTVYLQMNSLKPEDTAVYYCNVTMVRRDFTFVEYWGQGTQVTVSS

SEQ ID NO: 12147 - protein, 120 aa, synthetic construct
EVQLVESGGGLVQAGDSLRLSCTASGNSGSMIEMGWFRQAPGKEREFVASISGVGERTYYADSVKGRFTISRDDARNTVYLQMNSLKPEDTAVYYCNVTCMGGNRFREYWGQGTQVTVSS

SEQ ID NO: 12148 - protein, 119 aa, synthetic construct
EVQLVESGGGLVQAGDSLRLSCTASGDFGRMLEMGWFRQAPGKEREFVASISARYHQTYYADSVKGRFTISRDDARNTVYLQMNSLKPEDTAVYYCNVTGFLNGFCEYWGQGTQVTVSS

SEQ ID NO: 12149 - protein, 121 aa, synthetic construct
EVQLVESGGGLVQAGDSLRLSCTASGVNALVIEMGWFRQAPGKEREFVASISKMRLYTYYADSVKGRFTISRDDARNTVYLQMNSLKPEDTAVYYCNVTSLMDSHRFTEYWGQGTQVTVSS

SEQ ID NO: 12150 - protein, 121 aa, synthetic construct
EVQLVESGGGLVQAGDSLRLSCTASGGEVEVVEMGWFRQAPGKEREFVASISGKHIYTYYADSVKGRFTISRDDARNTVYLQMNSLKPEDTAVYYCNVWVIDSNTRFGEYWGQGTQVTVSS

SEQ ID NO: 12151 - protein, 120 aa, synthetic construct
EVQLVESGGGLVQAGDSLRLSCTASGVARAPLEMGWFRQAPGKEREFVASISGTGDYTYYADSVKGRFTISRDDARNTVYLQMNSLKPEDTAVYYCNVTMLCCGFLYEYWGQGTQVTVSS

SEQ ID NO: 12152 - protein, 119 aa, synthetic construct
EVQLVESGGGLVQAGDSLRLSCTASGRTDQFIEMGWFRQAPGKEREFVASISVISAATYYADSVKGRFTISRDDARNTVYLQMNSLKPEDTAVYYCNVTVFRSVFIEYWGQGTQVTVSS

SEQ ID NO: 12153 - protein, 120 aa, synthetic construct
EVQLVESGGGLVQAGDSLRLSCTASGNMDDTLEMGWFRQAPGKEREFVASISWMREYTYYADSVKGRFTISRDDARNTVYLQMNSLKPEDTAVYYCNVVSYTRRGFDEYWGQGTQVTVSS

SEQ ID NO: 12154 - protein, 120 aa, synthetic construct
EVQLVESGGGLVQAGDSLRLSCTASGITGMMIEMGWFRQAPGKEREFVASISGRGCYTYYADSVKGRFTISRDDARNTVYLQMNSLKPEDTAVYYCNFWTIITHRLCEYWGQGTQVTVSS

SEQ ID NO: 12155 - protein, 121 aa, synthetic construct
EVQLVESGGGLVQAGDSLRLSCTASGSRIVFVLMGWFRQAPGKEREFVASISGFGGLTYYADSVKGRFTISRDDARNTVYLQMNSLKPEDTAVYYCNVGDSLMGGPRLEYWGQGTQVTVSS

SEQ ID NO: 12156 - protein, 120 aa, synthetic construct
EVQLVESGGGLVQAGDSLRLSCTASGLVGIVIEMGWFRQAPGKEREFVASISMMRFYTYYADSVKGRFTISRDDARNTVYLQMNSLKPEDTAVYYCNVTHLPDGRRREYWGQGTQVTVSS

SEQ ID NO: 12157 - protein, 119 aa, synthetic construct
EVQLVESGGGLVQAGDSLRLSCTASGTTDRIMEMGWFRQAPGKEREFVASISGHGCETYYADSVKGRFTISRDDARNTVYLQMNSLKPEDTAVYYCNVTVLSSPKKEYWGQGTQVTVSS

SEQ ID NO: 12158 - protein, 120 aa, synthetic construct
EVQLVESGGGLVQAGDSLRLSCTASGDIRMMVEMGWFRQAPGKEREFVASISTRRGVTYYADSVKGRFTISRDDARNTVYLQMNSLKPEDTAVYYCNVTEFRSIRFVEYWGQGTQVTVSS

SEQ ID NO: 12159 - protein, 121 aa, synthetic construct
EVQLVESGGGLVQAGDSLRLSCTASGLIRDFLEMGWFRQAPGKEREFVASISGNKRYTYYADSVKGRFTISRDDARNTVYLQMNSLKPEDTAVYYCNVSFFGLRNAYVEYWGQGTQVTVSS

SEQ ID NO: 12160 - protein, 120 aa, synthetic construct
EVQLVESGGGLVQAGDSLRLSCTASGCVKGVGEMGWFRQAPGKEREFVTSISGWSEYTYYADSVKGRFTISRDDARNTVYLQMNSLKPEDTAVYYCNVSDVFNYMFREYWGQGTQVTVSS

SEQ ID NO: 12161 - protein, 124 aa, synthetic construct
EVQLVESGGGLVQAGDSLRLSCTASGVAGWGLEMGWFRQAPGKEREFVASISFVGNYTYYADSVKGRFTISRDDARNTVYLQMNSLKPEDTAVYYCNVLVVFDHVVRQRFMEYWGQGTQVTVSS

SEQ ID NO: 12162 - protein, 119 aa, synthetic construct
EVQLVESGGGLVQAGDSLRLSCTASGWRGVQVEMGWFRQAPGKEREFVASISGMSTSTYYADSVKGRFTISRDDARNTVYLQMNSLKPEDTAVYYCNVWVFEGSFKEYWGQGTQVTVSS

SEQ ID NO: 12163 - protein, 123 aa, synthetic construct
EVQLVESGGGLVQAGDSLRLSCTASGIGDIIMEMGWFRQAPGKEREFVASISGQLRWTYYADSVKGRFTISRDDARNTVYLQMNSLKPEDTAVYYCNITAFRHVGVRGRIEYWGQGTQVTVSS

SEQ ID NO: 12164 - protein, 119 aa, synthetic construct
EVQLVESGGGLVQAGDSLRLSCTASMSDQAIEMGWFRQAPGKEREFVASISGESFYTYYADSVKGRFTISRDDARNTVYLQMNSLKPEDTAVYYCNVSVIRSYLLNEYWGQGTQVTVSS

SEQ ID NO: 12165 - protein, 120 aa, synthetic construct
EVQLVESGGGLVQAGDSLRLSCTASGDRVVFRNMGWFRQAPGKEREFVASISGFRSLTYYADSVKGRFTISRDDARNTVYLQMNSLKPEDTAVYYCNVLGLEATVVLEYWGQGTQVTVSS

SEQ ID NO: 12166 - protein, 121 aa, synthetic construct
EVQLVESGGGLVQAGDSLRLSCTASGWKEIGIEMGWFRQAPGKEREFVASISRIGYYTYYADSVKGRFTISRDDARNTVYLQMNSLKPEDTAVYYCNVTALMPNRLFGEYWGQGTQVTVSS

SEQ ID NO: 12167 - protein, 121 aa, synthetic construct
EVQLVESGGGLVQAGDSLRLSCTASGLNGGYMEMGWFRQAPGKEREFVASISGVASYTYYADSVKGRFTISRDDARNTVYLQMNSLKPEDTAVYYCNVDIWLGLPGMAEYWGQGTQVTVSS

SEQ ID NO: 12168 - protein, 114 aa, synthetic construct
EVQLVESGGGLVQAGDSLRLSCTASGVAMSDILMGWFRQAPGKEREFVASISVRFRKTYYADSVKGRFTISRDDARNTVYLQMNSLKPEDTAVYYCNVDWSEYWGQGTQVTVSS

SEQ ID NO: 12169 - protein, 120 aa, synthetic construct
EVQLVESGGGLVQAGDSLRLSCTASGRMESLVEMGWFRQAPGKEREFVASISRDVTYTYYADSVKGRFTISRDDARNTVYLQMNSLKPEDTAVYYCNVVFVMSPTFREYWGQGTQVTVSS

SEQ ID NO: 12170 - protein, 121 aa, synthetic construct
EVQLVESGGGLVQAGDSLRLSCTASGQLSRVLEMGWFRQAPGKEREFVASISEWNLLTYYADSVKGRFTISRDDARNTVYLQMNSLKPEDTAVYYCNVTNWAILGGFSEYWGQGTQVTVSS

SEQ ID NO: 12171 - protein, 120 aa, synthetic construct
EVQLVESGGGLVQAGDSLRLSCTASGIAEDCIEMGWFRQAPGKEREFVASISGGGTYTYYADSVKGRFTISRDDARNTVYLQMNSLKPEDTAVYYCNVVRLVRGLFSEYWGQGTQVTVSS

SEQ ID NO: 12172 - protein, 122 aa, synthetic construct
EVQLVESGGGLVQAGDSLRLSCTASGIRDMLLEMGWFRQAPGKEREFVASISIDVGDTYYADSVKGRFTISRDDARNTVYLQMNSLKPEDTAVYYCNVTCVRLALLTFVEYWGQGTQVTVSS

SEQ ID NO: 12173 - protein, 124 aa, synthetic construct
EVQLVESGGGLVQAGDSLRLSCTASGMDDVALEMGWFRQAPGKEREFVASISGHDKYTYYADSVKGRFTISRDDARNTVYLQMNSLKPEDTAVYYCNVTSLIRVRCVARLVEYWGQGTQVTVSS

SEQ ID NO: 12174 - protein, 121 aa, synthetic construct
EVQLVESGGGLVQAGDSLRLSCTASGLMRVPMEMGWFRKAPGKEREFVASISVRTDYTYYTDSVKGRFTISRDDARNTVYLQMNSLKPEDTAVYYCNVSHIGHMGHLSEYWGQGTQVTVSS

SEQ ID NO: 12175 - protein, 117 aa, synthetic construct
EVQLVESGGGLVQAGDSLRLSCTASGMIAEAMEMGWFRQAPGKEREFVASISAYRWYTYYADSVKGRFTISRDDARNTVYLQMNSLKPEDTAVYYCRVTTLRWVEYWGQGTQVTVSS

SEQ ID NO: 12176 - protein, 119 aa, synthetic construct
EVQLVESGGGLVQAGDSLRLSCTASGLNMMPMEMGWFRQAPGKEREFVASISGTMTYTYYADSVKGRFTISRDDARNTVYLQMNSLKPEDTAVYYCNVTVVGDGILEYWGQGTQVTVSS

SEQ ID NO: 12177 - protein, 124 aa, synthetic construct
EVQLVESGGGLVQAGDSLRLSCTASGLQAKILEMGWFRQAPGKEREFVASISHSAEYTYYADSVKGRFTISRDDARNTVYLQMNSLKPEDTAVYYCNVSVIRIGQDSFMLVEYWGQGTQVTVSS

SEQ ID NO: 12178 - protein, 120 aa, synthetic construct
EVQLVESGGGLVQAGDSLRLSCTASGDNNRFIEMGWFRQAPGKEREFVASISRWSTYTYYADSVKGRFTISRDDARNTVYLQMNSLKPEDTAVYYCNVTAFVNCRFVEYWGQGTQVTVSS

SEQ ID NO: 12179 - protein, 124 aa, synthetic construct
EVQLVESGGGLVQAGDSLRLSCTASGIEDNVLEMGWFRQAPGKEREFVASISEVRGYTYYADSVKGRFTISRDDARNTVYLQMNSLKPEDTAVYYCNVTELMRARTCVMFKEYWGQGTQVTVSS

SEQ ID NO: 12180 - protein, 123 aa, synthetic construct
EVQLVESGGGLVQAGDSLRLSCTASGLMALVMEMGWFRQAPGKEREFVASISGVGNYTYYADSVKGRFTISRDDARNTVYLQMNSLKPEDTAVYYCNVLMLRDGWFTKFSEYWGQGTQVTVSS

SEQ ID NO: 12181 - protein, 120 aa, synthetic construct
EVQLVESGGGLVQAGDSLRLSCTASGATADIVDMGWFRQAPGKEREFVASISVKQVYTYYADSVKGRFTISRDDARNTVYLQMNSLKPEDTAVYYCNVTGIVPGSFIEYWGQGTQVTVSS

SEQ ID NO: 12182 - protein, 120 aa, synthetic construct
EVQLVESGGGLVQAGDSLRLSCTASGKLEQVLEMGWFRQAPGKEREFVASISGHGGTTYYADSVKGRFTISRDDARNTVYLQMNSLKPEDTAVYYCNVTVCMHGRFGEYWGQGTQVTVSS

SEQ ID NO: 12183 - protein, 125 aa, synthetic construct
EVQLVESGGGLVQAGDSLRLSCTARGKRIVFVTMGWFRQAPGKEREFVASISGFHTETYYADSVKGRFTISRDDARNTVYLQMNSLKPEDTAVYYCNVQPGVDVGFDELRIQEYWGQGTQVTVSS

SEQ ID NO: 12184 - protein, 120 aa, synthetic construct
EVQLVESGGGLVQAGDSLRLSCTASGVKYQVIEMGWFRQAPGKEREFVASISGTHDYTYYADSVKGRFTISRDDARNTVYLQMNSLKPEDTAVYYCNVVLFRGNQIGEYWGQGTQVTVSS

SEQ ID NO: 12185 - protein, 122 aa, synthetic construct
EVQLVESGGGLVQAGDSLRLSCTASGGGGIILEMGWVRQAPGKERAFGASISYSQAATYYADSGKGRFTISRDDARNTVYLQMNSLKPEDTVVYYCNVTSINVVNRVFIEYWGQGTQVTVSS

SEQ ID NO: 12186 - protein, 118 aa, synthetic construct
EVQLVESGGGLVQAGDSLRLSCTASGRRGVVIEMGWFRQAPGKEREFVASISGLSFYTYYADSVKGRFTISRDDARNTVYLQMNSLKPEDTAVYYCNVEHASRVVEYWGQGTQVTVSS

SEQ ID NO: 12187 - protein, 120 aa, synthetic construct
EVQLVESGGGLVQAGDSLRLSCTASGEGLIYLEMGWFRQAPGKEREFVASISAFHDYTYYADSVKGRFTISRDDARNTVYLQMNSLKPEDTAVYYCNVVSFGNFGKHEYWGQGTQVTVSS

SEQ ID NO: 12188 - protein, 120 aa, synthetic construct
EVQLVESGGGLVQAGDSLRLSCTASGSVKRKLEMGWFRQAPGKEREFVASISVDLAYTYYADSVKGRFTISRDDARNTVYLQMNSLKPEDTAVYYCNVVVFNGKGFMEYWGQGTQVTVSS

SEQ ID NO: 12189 - protein, 120 aa, synthetic construct
EVQLVESGGGLVQAGDSLRLSCTASGYLNVEARMGWFRQAPGKEREFVASISWWMGDTYYADSVKGRFTISRDDARNTVYLQMNSLKPEDTAVYYCNVVRGVSWTVNEYWGQGTQVTVSS

SEQ ID NO: 12190 - protein, 120 aa, synthetic construct
EVQLVESGGGLVQAGDSLRLSCTASGHGGPYMEMGWFRQAPGKEREFVASISGSSVYTYYADWVKGRFTISRDDARNTVYLQMNSLKPEDTAVYYCNVVGASLSEMEEYWGQGTQVTVSS

SEQ ID NO: 12191 - protein, 119 aa, synthetic construct
EVQLVESGGGLVQAGDSLRLSCTASGAWENMLEMGWFRQAPGKEREFVASISGYSMTYYADSVKGRFTISRDDARNTVYLQMNSLKPEDTAVYYCNVTIWKIMLFVEYWGQGTQVTVSS

SEQ ID NO: 12192 - protein, 120 aa, synthetic construct
EVQLVESGGGLVQAGDSLRLSCTASGNPLGVLEMGWFRQAPGKEREFVASISVNVAYTYYADSVKGRFTISRDDARNTVYLQMNSLKPEDTAVYYCNVTTINRGVIAEYWGQGTQVTVSS

SEQ ID NO: 12193 - protein, 120 aa, synthetic construct
EVQLVESGGGLVQAGDSLRLSCTASGNRGMCIEMGWFRQAPGKEREFVASISGREYATYYADSVKGRFTISRDDARNTVYLQMNSLKPEDTAVYYCNVTQHIFNRFVEYWGQGTQVTVSS

SEQ ID NO: 12194 - protein, 117 aa, synthetic construct
EVQLVESGGGLVQAGDSLRLSCTASGYRGSMMELGWFRQAPGKEREFVASISMRVSYTYYADSVKGRFTISRDDARNTVYLQMNSLKPEDTAVYYCNVTLRNFNEYWGQGTQVTVSS

SEQ ID NO: 12195 - protein, 119 aa, synthetic construct
EVQLVESGGGLVQAGDSLRLSCTASGNVAGALEMGWFRQAPGKEREFVASISVKCNKTYYADSVKGRFTISRDDARNTVYLQMNSLKPEDTAVYYCNVTVFRVVFSEYWGQGTQVTVSS

SEQ ID NO: 12196 - protein, 118 aa, synthetic construct
EVQLVESGGGLVQAGDSLRLSCTASGKSRRMTVMGWFRQAPGKEREFVASISGFDDNTYYADSVKGRFTISRDDARNTVYLQMNSLKPEDTAVYYCNVLVLEGWIEYWGQGTQVTVSS

SEQ ID NO: 12197 - protein, 120 aa, synthetic construct
EVQLVESGGGLVQAGDSLRLSCTASGGSAEFIEMGWFRQAPGKEREFVASISVRDFYTYYADSVKGRFTISRDDARNTVYLQMNSLKPEDTAVYYCNVTCVIDMGIKEYWGQGTQVTVSS

SEQ ID NO: 12198 - protein, 120 aa, synthetic construct
EVQLVESGGGLVQAGDSLRLSCTASGLKGDVMEMGWFRQAPGKEREFVASISGNRASTYYADSVKGRFTISRDDARNTVYLQMNSLKPEDTAVYYCNVTIVVDRRFLEYWGQGTQVTVSS

SEQ ID NO: 12199 - protein, 121 aa, synthetic construct
EVQLVESGGGLVQAGDSLRLSCTASGFITVLLEMGWFRQAPGKEREFVASISGVSEYTYYADSVKGRFTISRDDARNTVYLQMNSLKPEDTAVYYCNVTVMDVRHGMREYWGQGTQVTVSS

SEQ ID NO: 12200 - protein, 122 aa, synthetic construct
EVQLVESGGGLVQAGDSLRLSCTASGLMCLVVEMGWFRQAPGKEREFVASISGWGMRTYYADSVKGRFTISRDDARNTVYLQMNSLKPEDTAVYYCRVDDLDQVVGRLREYWGQGTQVTVSS

SEQ ID NO: 12201 - protein, 121 aa, synthetic construct
EVQLVESGGGLVQAGDSLRLSCTASGIETIFLEMGWFRQAPGKEREFVASISGTWLGTYYADSVKGRFTISRDDARNTVYLQMNSLKPEDTAVYYCFRVNFVLGIGFSEYWGQGTQVTVSS

SEQ ID NO: 12202 - protein, 123 aa, synthetic construct
EVQLVESGGGLVQAGDSLRLSCTASGRGASHIEMGWFRQAPGKEREFVASISVRDALTYYSDSVKGRFTISRDDARNTVYLQMNSLKPEDTAVYYCNVTGLLLDLGRRFMEYWGQGTQVTVSS

SEQ ID NO: 12203 - protein, 122 aa, synthetic construct
EVQLVESGGGLVQAGDSLRLSCTASGILFVFREMGWFRQAPGKEREFVASISVFHSITYYADSVKGRFTISRDDARNTVYLQMNSLKPEDTAVYYCNVGSSQVARLDLEEYWGQGTQVTVSS

SEQ ID NO: 12204 - protein, 123 aa, synthetic construct
EVQLVESGGGLVQAGDSLRLSCTASGMVGDIQEMGWFRQAPGKEREFVASISMQNGYTYYADSVKGRFTISRDDARNTVYLQMNSLKPEDTAVYYCNVTTFHYSRARWVTEYWGQGTQVTVSS

SEQ ID NO: 12205 - protein, 125 aa, synthetic construct
EVQLVESGGGLVQAGDSLRLSCTASGYFALVSHMGWFRQAPGKEREFVASISGMGSVTYYADSVKGRFTISRDDARNTVYLQMNSLKPEDTAVYYCNVVELVRGDRGLSRLFEYWGQGTQVTVSS

SEQ ID NO: 12206 - protein, 119 aa, synthetic construct
EVQLVESGGGLVQAGDSLRLSCTASGNCKHMMEMGWFRQAPGKEREFVASISMIRGYTYYADSVKGRFTISRDDARNTVYLQMNSLKPEDTAVYYCNVSELFRYLKEYWGQGTQVTVSS

SEQ ID NO: 12207 - protein, 119 aa, synthetic construct
EVQLVESGGGLVQAGDSLRLSCTASGGRIGFVEMGWFRQAPGKEREFVASISGFNLVTYYADSVKGRFTISRDDARNTVYLQMNSLKPEDTAVYYCNVVDYTRGTHEYWGQGTQVTVSS

SEQ ID NO: 12208 - protein, 124 aa, synthetic construct
EVQLVESGGGLVQAGDSLRLSCTASGSATDFMEMGWFRQAPGKEREFVASISWRRDYTYYADSVKGRFTISRDDARNTVYLQMNSLKPEDTAVYYCNVTRLRWTSARYRFAEYWGQGTQVTVSS

SEQ ID NO: 12209 - protein, 119 aa, synthetic construct
EVQLVESGGGLVQAGDSLRLSCTASGIIQDVMEMGWFRQAPGKEREFVASISGFHQDTYYADSVKGRFTISRDDARNTVYLQMNSLKPEDTAVYYCNVGRVTCIGTEYWGQGTQVTVSS

SEQ ID NO: 12210 - protein, 119 aa, synthetic construct
EVQLVESGGGLVQAGDSLRLSCTASGSDGAWMEMGWFRQAPGKEREFVASISGGDIYTYYADSVKGRFTISRDDARNTVYLQMNSLKPEDTAVYYCNVVRVSGRFLEYWGQGTQVTVSS

SEQ ID NO: 12211 - protein, 124 aa, synthetic construct
EVQLVESGGGLVQAGDSLRLSCTASGSAKDRVEMGWFRQAPGKEREFVASISSACVYTYYADSVKGRFTISRDDARNTVYLQMNSLKPEDTAVYYCNVTTVAVRSLKVVVTEYWGQGTQVTVSS

SEQ ID NO: 12212 - protein, 120 aa, synthetic construct
EVQLVESGGGLVQAGDSLRLSCTASGLANNALEMGWFRQAPGKEREFVASISTTTGGTYYADSVKGRFTISRDDARNTVYLQMNSLKPEDTAVYYCNVTVVAIYSFGEYWGQGTQVTVSS

SEQ ID NO: 12213 - protein, 117 aa, synthetic construct
EVQLVESGGGLVQAGDSLRLSCTASGVSGIAMEMGWFRQAPGKEREFVASISMHKVYTYYADSVKGRFTISRDDARNTVYLQMNSLKPEDTAVYYCNVTTVVMMEYWGQGTQVTVSS

SEQ ID NO: 12214 - protein, 120 aa, synthetic construct
EVQLVESGGGLVQAGDSLRLSCTASGMVGQILEMGWFRQAPGKEREFVASISGQTVYTYYADSVKGRFTISRDDARNTVYLQMNSLKPEDTAVYYCNVSRLEEGLIVEYWGQGTQVTVSS

SEQ ID NO: 12215 - protein, 120 aa, synthetic construct
EVQLVESGGGLVQAGDSLRLSCTASGITAVKIEMGWFRQAPEKEREFVASISVHGGLTYYADSVKGRFTISRDDARNTVYLQMNSLKPEDTAVYYCNVWVWNGTGFKEYWGQGTQVTVSS

SEQ ID NO: 12216 - protein, 123 aa, synthetic construct
EVQLVESGGGLVQAGDSLRLSCTASGGIGQLIEMGWFRQAPGKEREFVASISTRLQYTYYADSVKGRFTISRDDARNTVYLQMNSLKPEDTAVYYCNVTIIPMVITRSFYEYWGQGTQVTVSS

SEQ ID NO: 12217 - protein, 119 aa, synthetic construct
EVQLVESGGGLVQAGDSLRLSCTASGGMSQLLEMGWFRQAPGKEREFVASISGNAGMTYYADSVKGRFTISRDDARNTVYLQMNSLKPEDTAVYYCNVTVYIGSFVEYWGQGTQVTVSS

SEQ ID NO: 12218 - protein, 117 aa, synthetic construct
EVQLVESGGGLVQAGDSLRLSCTASGDRGFYMEMGWFRQAPGKEREFVASISMQRVGTYYADSVKGRFTISRDDARNTVYLQMNSLKPEDTAVYYCNVTKIDFLEYWGQGTQVTVSS

SEQ ID NO: 12219 - protein, 120 aa, synthetic construct
EVQLVESGGGLVQAGDSLRLSCTASGLVCVVVEMGWFRQAPGKEREFVASISGAGKWTYYADSVKGRFTISRDDARNTVYLQMNSLKPEDTAVYYCNVTSFSNACFVEYWGQGTQVTVSS

SEQ ID NO: 12220 - protein, 121 aa, synthetic construct
EVQLVESGGGLVQAGDSLRLSCTASGDRRVVVEMGWFRQAPGKEREFVASISKTAIYTYYADSVKGRFTISRDDARNTVYLQMNSLKPEDTAVYYCNVTVLDAERGFGEYWGQGTQVTVSS

SEQ ID NO: 12221 - protein, 120 aa, synthetic construct
EVQLVESGGGLVQAGDSLRLSCTASGAMKLFIEMGWFRQAPGKEREFVASISARVGMTYYADSVKGRFTISRDDARNTVYLQMNSLKPEDTAVYYCNVTSLGGSGFLEYWGQGTQVTVSS

SEQ ID NO: 12222 - protein, 120 aa, synthetic construct
EVQLVESGGGLVQAGDSLRLSCTASGIGKFVIEMGWFRQAPGKEREFVASISGLYIWTYYADSVKGRFTISRDDARNTVYLQMNSLKPEDTAVYYCNVTVHEENKFIEYWGQGTQVTVSS

SEQ ID NO: 12223 - protein, 117 aa, synthetic construct
EVQLVESGGGLVQAGDSLRLSCTASGFGSAILVMGWFRQAPGKEREFVASISSHWNDTYYADSVKGRFTISRDDARNTVYLQMNSLKPEDTAVYYCNVLTGQWCEYWGQGTQVTVSS

SEQ ID NO: 12224 - protein, 122 aa, synthetic construct
EVQLVESGGGLVQAGDSLRLSCTASGDNGQWMEMGWFRQAPGKEREFVASISFSHDGTYYADSVKGRFTISRDDARNTVYLQMNSLKPEDTAVYYCNVTVLGAVRRGFSEYWGQGTQVTVSS

SEQ ID NO: 12225 - protein, 117 aa, synthetic construct
EVQLVESGGGLVQAGDSLRLSCTASGTGVSPVIMGWFRQAPGKEREFVASISGKVGLTYYADSVKGRFTISWDDARNTVYLQMNSLKPEDTAVYYCNVVSSRIVEYWGQGTQVTVSS

SEQ ID NO: 12226 - protein, 119 aa, synthetic construct
EVQLVESGGGLVQAGDSLRLSCTASGRDASVLGMGWFRQAPGKEREFVASISVPFGNTYYADSVKGRFTISRDDARNTVYLQMNSLKPEDTAVYYCNVTSFRRGFVEYWGQGTQVTVSS

SEQ ID NO: 12227 - protein, 119 aa, synthetic construct
EVQLVESGGGLVQAGDSLRLSCTASGSRIVFNRMGWFRQAPGKEREFVASISGFHETTYYADSVKGRFTISRDDARNTVYLQMNSLKPEDTAVYYCNVAETAFRGDEYWGQGTQVTVSS

SEQ ID NO: 12228 - protein, 120 aa, synthetic construct
EVQLVESGGGLVQAGDSLRLSCTASGLTSLVLEMGWFRQAPGKEREFVASISGRDGDTYYADSVKGRFTISRDDARNTVYLQMNSLKPEDTAVYYCNVTTIRTRQFLEYWGQGTQVTVSS

SEQ ID NO: 12229 - protein, 119 aa, synthetic construct
EVQLVESGGGLVQAGDSLRLSCTASGWVGLVVEMGWFRQAPGKEREFVASISGLGVGTYYADSVKGRFTISRDDARNTVYLQMNSLKPEDTAVYYCNVTALDLVFFEYWGQGTQVTVSS

SEQ ID NO: 12230 - protein, 120 aa, synthetic construct
EVQLVESGGGLVQAGDSLRLSCTASGMYGILVEMGWFRQAPGKEREFVASISGKMSDTYYADSVKGRFTISRDDARNTVYLQMNSLKPEDTAVYYCNVTSFKTDWFCEYWGQGTQVTVSS

SEQ ID NO: 12231 - protein, 119 aa, synthetic construct
EVQLVESGGGLVQAGDSLRLSCTASGVGGRDESMGWFRQAPGKEREFVASISGFRGDTYYADSVKGRFTISRDDARNTVYLQMNSLKPEDTAVYYCNVNDRDLMVDEYWGQGTQVTVSS

SEQ ID NO: 12232 - protein, 120 aa, synthetic construct
EVQLVESGGGLVQAGDSLRLSCTASGHMETGIEMGWFRQAPGKEREFVASISTLRGITYYADSVKGRFTISRDDARNTVYLQMNSLKPEDTAVYYCNVTAVYRGMFKEYWGQGTQVTVSS

SEQ ID NO: 12233 - protein, 121 aa, synthetic construct
EVQLVESGGGLVQAGDSLRLSCTASGHVLRTVEMGWFRQAPGKEREFVASISGVHNYTYYADSVKGRFTISRDDARNTVYLQMNSLKPEDTAVYYCNVVFVIIGHGFVEYWGQGTQVTVSS

SEQ ID NO: 12234 - protein, 124 aa, synthetic construct
EVQLVESGGGLVQAGDSLRLSCTASGLIGVIVEMGWFRQAPGKEREFVASISGRTTDTYYADSVKGRFTISRDDARNTVYLQMNSLKPEDTAVYYCNVTTMQYLGDGIGKNEYWGQGTQVTVSS

SEQ ID NO: 12235 - protein, 121 aa, synthetic construct
EVQLVESGGGLVQAGDSLRLSCTASGNIMGMIEMGWFRQAPGKEREFVASISSNWNSTYYADSVKGRFTISRDDARNTVYLQMNSLKPEDTAVYYCNVTTIIPRLNFREYWGQGTQVTVSS

SEQ ID NO: 12236 - protein, 121 aa, synthetic construct
EVQLVESGGGLVQAGDSLRLSCTASGLAGVTIEMGWFRQAPGKEREFVASISGNDGGTYYADSVKGRFTISRDDARNTVYLQMNSLKPEDTAVYYCNVTVAQLGLSFKEYWGQGTQVTVSS

SEQ ID NO: 12237 - protein, 119 aa, synthetic construct
EVQLVESGGGLVQAGDSLRLSCTASGQNGLTVEMGWFRQAPGKEREFVASISCVHVYTYYADSVKGRFTISRDDARNTVYLQMNSLKPEDTAVYYCNVTSFKLGRLEYWGQGTQVTVSS

SEQ ID NO: 12238 - protein, 124 aa, synthetic construct
EVQLVESGGGLVQAGDSLRLSCTASGLVIERDIMGWFRQAPGKEREFVASILLGRGVTYYADSVKGRFTISRDDARNTVYLQMNSLKPEDTAVYYCNVNTVFRCQFQGLVMEYWGQGTQVTVSS

SEQ ID NO: 12239 - protein, 121 aa, synthetic construct
EVQLVESGGGLVQAGDSLRLSCTASGSDRNVIEMGWFRQAPGKEREFVASISGVSILTYYADSVKGRFTISRDDARNTVYLQMNSLKPEDTAVYYCNVTIFHLSARFIEYWGQGTQVTVSS

SEQ ID NO: 12240 - protein, 121 aa, synthetic construct
EVQLVESGGGLVQAGDSLRLSCTASGDVCGLLEMGWFRQAPGKEREFVASISWGLGATYYADSVKGRFTISRDDARNTVYLQMNSLKPEDTAVYYARSSAMLPARLLREYWGQGTQVTVSS

SEQ ID NO: 12241 - protein, 119 aa, synthetic construct
EVQLVESGGGLVQAGDSLRLSCTASGIDGMLMEMGWFRQAPGKEREFVASISCQVRYTYYADSVKGRFTISRDDARNTVYLQMNSLKPEDTAVYYCNVVQWRGEKLEYWGQGTQVTVSS

SEQ ID NO: 12242 - protein, 119 aa, synthetic construct
EVQLVESGGGLVQAGDSLRLSCTASGGNPGIIEMGWFRQAPGKEREFVASISRVRTYTYYADSVKGRFTISRDDARNTVYLQMNSLKPEDTAVYYCFNTYAMDTFHEYWGQGTQVTVSS

SEQ ID NO: 12243 - protein, 121 aa, synthetic construct
EVQLVESGGGLVQAGDSLRLSCTASGVRHGFMEMGWFRQAPGKERKFVASISGAGSFTYYADSVKGRFTISRDDARNTVYLQMNSLKPEDTAVYYCNVTVWMESGVFREYWGQGTQVTVSS

SEQ ID NO: 12244 - protein, 123 aa, synthetic construct
EVQLVESGGGLVQAGDSLRLSCTASGSRVAFLEMGWFRQAPGKEREFVASISMRGLTYYADSVKGRFTISRDDARNTVYLQMNSLKPEDTAVYYCNVTCLDVIGAVPVFREYWGQGTQVTVSS

SEQ ID NO: 12245 - protein, 119 aa, synthetic construct
EVQLVESGGGLVQAGDSLRLSCTASGLGVSVLEMGWFRQAPGKEREFVASISMKLDYTYYADSVKGRFTISRDDARNTVYLQMNSLKPEDTAVYYCNVTSFDKFVREYWGQGTQVTVSS

SEQ ID NO: 12246 - protein, 120 aa, synthetic construct
EVQLVESGGGLVQAGDSLRLSCTASGGMMGWLEMGWFRQAPGKEREFVASISVKVHATYYADSVKGRFTISRDDARNTVYLQMNSLKPEDTAVYYCNVTSCIVGRFVEYWGQGTQVTVSS

SEQ ID NO: 12247 - protein, 123 aa, synthetic construct
EVQLVESGGGLVQAGDSLRLSCTASGIRDRVLEMGWFRQAPGKEREFVASISGARHVTYYADSVKGRFTISRDDARNTVYLQMNSLKPEDTAVYYCNVTVVTLRGVLVFEEYWGQGTQVTVSS

SEQ ID NO: 12248 - protein, 120 aa, synthetic construct
EVQLVESGGGLVQAGDSLRLSCTASGPIVSVLEMGWFRQAPGKEREFVASISGNTSYTYYADSVKGRFTISRDDARNTVYLQMNSLKPEDTAVYYCNVDSLRGCTMLEYWGQGTQVTVSS

SEQ ID NO: 12249 - protein, 117 aa, synthetic construct
EVQLVESGGGLVQAGDSLRLSCTASGTQEWCLIMGWFRQAPGKEREFVASISGTAGVTYYADSVKGRFTISRDDARNTVYLQMNSLKPEDTAVYYCNVVSHRVREYWGQGTQVTVSS

SEQ ID NO: 12250 - protein, 121 aa, synthetic construct
EVQLVESGGGLVQAGDSLRLSCTASGDGGHRVEMGWFRQAPGKEREFVASISMQAYYTYYADSVKGRFTISRDDARNTVYLQMNSLKPEDTAVYYCNVVEVMVSNGFLEYWGQGTQVTVSS

SEQ ID NO: 12251 - protein, 119 aa, synthetic construct
EVQLVESGGGLVQAGDSLRLSCTASGNLSTALEMGWFRQAPGKEREFVASISVRNGGTYYADSVKGRFTISRDDARNTVYLQMNSLKPEDTAVYYCNVVIIAGIFMEYWGQGTQVTVSS

SEQ ID NO: 12252 - protein, 120 aa, synthetic construct
EVQLVESGGGLVQAGDSLRLSCTASGLGPDILEMGWFRQAPGKEREFVASISVAGSYTYYADSVKGRFTISRDDARNTVYLQMNSLKPEDTAVYYCNVVFVHRWRFVEYWGQGTQVTVSS

SEQ ID NO: 12253 - protein, 118 aa, synthetic construct
EVQLVESGGGLVQAGDSLRLSCTASGPFPQYMSMGWFRQAPGKEREFVASISWDTVDTYYADSVKGRFTISRDDARNTVYLQMNSLKPEDTAVYYCNVVFRLWVGEYWGQGTQVTVSS

SEQ ID NO: 12254 - protein, 122 aa, synthetic construct
EVQLVESGGGLVQAGDSLRLSCTASGVGSSVVEMGWFRQAPGKEREFVASISQHADYTYYADSVKGRFTISRDDARNTVYLQMNSLKPEDTAVYYCNVTMFDGHRSAFFEYWGQGTQVTVSS

SEQ ID NO: 12255 - protein, 123 aa, synthetic construct
EVQLVESGGGLVQAGDSLRLSCTASGDLTNGLSMGWFRQAPGKEREFVASISGRAVGTYYADSVKGRFTISRDDARNTVYLQMNSLKPEDTAVYYCNVLTRFLRELMGEVEYWGQGTQVTVSS

SEQ ID NO: 12256 - protein, 120 aa, synthetic construct
EVQLVESGGGLVQAGDSLRLSCTASGCKESLMEMGWFRQAPGKEREFVASISGSLVYTYYADSVKGRFTISRDDARNTVYLQMNSLKPEDTAVYYCNVVLCILCRFEEYWGQGTQVTVSS

SEQ ID NO: 12257 - protein, 120 aa, synthetic construct
EVQLVESGGGLVQAGDSLRLSCTASGMGQNAIEMGWFRQAPGKEREFVASISVATGTTYYADSVKGRFTISRDDARNTVYLQMNSLKPEDTAVYYCNVTRIVLVGFAEYWGQGTQVTVSS

SEQ ID NO: 12258 - protein, 119 aa, synthetic construct
EVQLVESGGGLVQAGDSLRLSCTASGIMGNVVGMGWFRQAPGKEREFVASISSVGANTYYADSVKGRFTISRDDARNTVYLQMNSLKPEDTAVYYCNVTVIIGLFREYWGQGTQVTVSS

SEQ ID NO: 12259 - protein, 120 aa, synthetic construct
EVQLVESGGGLVQAGDSLRLSCTASGTQGVLLEMGWFRQAPGKEREFVASIGVDGYTYYADSVKGRFTISRDDARNTVYLQMNSLKPEDTAVYYCNVVEITQIGRPVEYWGQGTQVTVSS

SEQ ID NO: 12260 - protein, 120 aa, synthetic construct
EVQLVESGGGLVQAGDSLRLSCTASGLMRGVLEMGWFRQAPGKEREFVASISESRSSTYYADSVKGRFTISRDDARNTVYLQMNSLKPEDTAVYYCNVTIFTGVVFMEYWGQGTQVTVSS

SEQ ID NO: 12261 - protein, 121 aa, synthetic construct
EVQLVESGGGLVQAGDSLRLSCTASGSLVVVIEMGWFRQAPGKEREFVASISGKGLSTYYADSVKGRFTISRDDARNTVYLQMNSLKPEDTAVYYARFSDLGNLCRIKEYWGQGTQVTVSS

SEQ ID NO: 12262 - protein, 121 aa, synthetic construct
EVQLVESGGGLVQAGDSLRLSCTASGMGGRVIEMGWFRQAPGKEREFVASISTVGVYTYYADSVKGRFTISRDDARNTVYLQMNSLKPEDTAVYYCNVTRYGIDLIFDEYWGQGTQVTVSS

SEQ ID NO: 12263 - protein, 122 aa, synthetic construct
EVQLVESGGGLVQAGDSLRLSCTASGRSGSAIEMGWFRQAPEKEREFVASISVRARHTYYADSVKGRFTISRDDARNTVYLQMNSLKPEDTAVYYCNVTCLERNIVAFREYWGQGTQVTVSS

SEQ ID NO: 12264 - protein, 119 aa, synthetic construct
EVQLVESGGGLVQAGDSLRLSCTASGRIGIVVEMGWFRQAPGKEREFVASISNRSSYTYYADSVKGRFTISRDDARNTVYLQMNSLKPEDTAVYYCNVVGITISFVEYWGQGTQVTVSS

SEQ ID NO: 12265 - protein, 120 aa, synthetic construct
EVQLVESGGGLVQAGDSLRLSCTASGRRLVFILMGWFRQAPGKEREFVASISGFQGSTYYADSVKGRFTISRDDARNTVYLQMNSLKPEDTAVYYCNVFGDGGMSGAEYWGQGTQVTVSS

SEQ ID NO: 12266 - protein, 121 aa, synthetic construct
EVQLVESGGGLVQAGDSLRLSCTASGLSGGALEMGWFRQAPGKEREFVASISGQGWYTYYADSVKGRFTISRDDARNTVYLQMNSLKPEDTAVYYCNVTRIMDLRWVEEYWGQGTQVTVSS

SEQ ID NO: 12267 - protein, 122 aa, synthetic construct
EVQLVESGGGLVQAGDSLRLSCTASGHVMDVLEMGWFRQAPGKEREFVASISWRDWGTYYADSVKGRFTISRDDARNTVYLQMNSLKPEDTAVYYCNVTTHRIGQHFFGEYWGQGTQVTVSS

SEQ ID NO: 12268 - protein, 121 aa, synthetic construct
EVQLVESGGGLVQAGDSLRLSCTASGTGQAVLEMGWFRQAPGKEREFVASISGSNHYTYYADSVKGRFTISRDDARNTVYLQMNSLKPEDTAVYYCNVTMLRAGVALVEYWGQGTQVTVSS

SEQ ID NO: 12269 - protein, 121 aa, synthetic construct
EVQLVESGGGLVQAGDSLRLSCTASGQEEFRLEMGWFRQAPGKEREFVASISTRIGYTYYADSVKGRFTISRDDARNTVYLQMNSLKPEDTAVYYCNVVCLDSTLRFNEYWGQGTQVTVSS

SEQ ID NO: 12270 - protein, 122 aa, synthetic construct
EVQLVESGGGLVQAGDSLRLSCTASGHVNGVLEMGWFRQAPGKEREFVASISARTSYTYYADSVKGRFTISRDDARNTVYLQMNSLKPEDTAVYYCNVVVIAVNGFTFEEYWGQGTQVTVSS

SEQ ID NO: 12271 - protein, 117 aa, synthetic construct
EVQLVESGGGLVQAGDSLRLSCTASGQGTDVMEMGWFRQAPGKEREFVASISSLRIYTYYADSVKGRFTISRDDARNTVYLQMNSLKPEDTAVYYCNVTMVNFREYWGQGTQVTVSS

SEQ ID NO: 12272 - protein, 121 aa, synthetic construct
EVQLVESGGGLVQAGDSLRLSCTASGMIGYVMEMGWFRQAPGKEREFVASISMRSLYTYYADSVKGRFTISRDDARNTVYLQMNSLKPEDTAVYYCNVTVSVERGGFVEYWGQGTQVTVSS

SEQ ID NO: 12273 - protein, 122 aa, synthetic construct
EVQLVESGGGLVQAGDSLRLSCTASGHGEDNIEMGWFRQAPGKEREFVASISNWGGYTYYADSVKGRFTISRDDARNTVYLQMNSLKPEDTAVYYCNVTGWCVRKMLFHEYWGQGTQVTVSS

SEQ ID NO: 12274 - protein, 118 aa, synthetic construct
EVQLVESGGGLVQAGDSLRLSCTASGVVEARSRMGWFRQAPGKEREFVASISGWVNQTYYADSVKGRFTISRDDARNTVYLQMNSLKPEDTAVYYCNVLSLCDWKEYWGQGTQVTVSS

SEQ ID NO: 12275 - protein, 120 aa, synthetic construct
EVQLVESGGGLVQAGDSLRLSCTASGCGEGRLEMGWFRQAPGKEREFVASISLRSTYTYYADSVKGRFTISRDDARNTVYLQMNSLKPEDTAVYYCNVVLAVGIRFLEYWGQGTQVTVSS

SEQ ID NO: 12276 - protein, 120 aa, synthetic construct
EVQLVESGGGLVQAGDSLRLSCTASGLVEKVIEMGWFRQAPGKEREFVASISDGGGYTYYADSVKGRFTISRDDARNTVYLQMNSLKPEDTAVYYCNVTTFVVWGRVEYWGQGTQVTVSS

SEQ ID NO: 12277 - protein, 119 aa, synthetic construct
EVQLVESGGGLVQAGDSLRLSCTASGDVGHMVEMGWFRQAPGKEREFVASISRRQYYTYYADSVKGRFTISRDDARNTVYLQMNSLKPEDTAVYYCNVTVIANRLFEYWGQGTQVTVSS

SEQ ID NO: 12278 - protein, 119 aa, synthetic construct
EVQLVESGGGLVQAGDSLRLSCTASGVIKCRVSMGWFRQAPGKEREFVADISNAGDTYYADSVKGRFTISRDDARNTVYLQMNSLKPEDTAVYYCNVYQVALAAIVEYWGQGTQVTVSS

SEQ ID NO: 12279 - protein, 122 aa, synthetic construct
EVQLVESGGGLVQAGDSLRLSCTASGMVTKVIEMGWFRQAPGKEREFVASISARGGYTYYADSVKGRFTISRDDARNTVYLQMNSLKPEDTAVYYCNVWFMCNASPFLAEYWGQGTQVTVSS

SEQ ID NO: 12280 - protein, 120 aa, synthetic construct
EVQLVESGGGLVQAGDSLRLSCTASGSMESIMEMGWFRQAPGKEREFVASISVMGGYTYYADSVKGRFTISRDDARNTVYLQMNSLKPEDTAVYYCNVTVLLDRGFDEYWGQGTQVTVSS

SEQ ID NO: 12281 - protein, 124 aa, synthetic construct
EVQLVESGGGLVQAGDSLRLSCTASGRPVSVIEMGWFRQAPGKEREFVASISVSQLYTYYADSVKGRFTISRDDARNTVYLQMNSLKPEDTAVYYCNVTAVVSNNNFGVFREYWGQGTQVTVSS

SEQ ID NO: 12282 - protein, 120 aa, synthetic construct
EVQLVESGGGLVQAGDSLRLSCTASGHVGRMLEMGWFRQAPGKEREFVASISDGALQTYYADSVKGRFTISRDDARNTVYLQMNSLKPEDTAVYYCNVWKVLIDGFREYWGQGTQVTVSS

SEQ ID NO: 12283 - protein, 120 aa, synthetic construct
EVQLVESGGGLVQAGDSLRLSCTASGNCAGALEMGWFRQAPGKEREFVASISGKGKYTYYADSVKGRSTISRDDARNTVYLQMNSLKPEDTAVYYCNVSIVVSGGFMEYWGQGTQVTVSS

SEQ ID NO: 12284 - protein, 120 aa, synthetic construct
EVQLVESGGGLVQAGDSLRLSCTASGKLEVGLEMGWFRQAPGKEREFVASISVAGAYTYYADSVKGRFTISRDDARNTVYLQMNSLKPEDTAVYYCNVTTIVEKAFKEYWGQGTQVTVSS

SEQ ID NO: 12285 - protein, 120 aa, synthetic construct
EVQLVESGGGLVQAGDSLRLSCTASGVRGQVLEMGWFRQAPGKEREFVASISGVNVYTYYADSVKGRFTISRDDARNTVYLQMNSLKPEDTAVYYCNVVLFLRSYCREYWGQGTQVTVSS

SEQ ID NO: 12286 - protein, 120 aa, synthetic construct
EVQLVESGGGLVQAGDSLRLSCTASGLNMMPMEMGWFRQAPGKEREFVASISGTMTYTYYADSVKGRFTISRDDARNTVYLQMNSLKPEDTAVYYCNVVVLRSIRFCEYWGQGTQVTVSS

SEQ ID NO: 12287 - protein, 119 aa, synthetic construct
EVQLVESGGGLVQAGDSLRLSCTASGQGFGIVEMGWFRQAPGKEREFVASISSGHTYTYYADSVKGRFTISRDDARNTVYLQMNSLKPEDTAVYYCNVTIITVMFMEYWGQGTQVTVSS

SEQ ID NO: 12288 - protein, 120 aa, synthetic construct
EVQLVESGGGLVQAGDSLRLSCTASGTRMVFIGMGWFRQAPGKEREFVASISGFGQGTYYADSVKGRFTISRDDARNTVYLQMNSLKPEDTAVYYCNVCDGVARNVREYWGQGTQVTVSS

SEQ ID NO: 12289 - protein, 120 aa, synthetic construct
EVQLVESGGGLVQAGDSLRLSCTASGALSLMIEMGWFRQAPGKEREFVASISGVDSMTYYADSVKGRFTISRDDARNTVYLQMNSLKPEDTAVYYCNVWILKGCRFIEYWGQGTQVTVSS

SEQ ID NO: 12290 - protein, 119 aa, synthetic construct
EVQLVESGGGLVQAGDSLRLSCTASGAPDGTIEMGWFRQAPGKEREFVASISKTTAYTYYADSVKGRFTISRDDARNTVYLQMNSLKPEDTAVYYCNVTIYVRWFEEYWGQGTQVTVSS

SEQ ID NO: 12291 - protein, 120 aa, synthetic construct
EVQLVESGGGLVQAGDSLRLSCTASGRLWGILEMGWFRQAPGKEREFVASISWHGDYTYYADSVKGRFTISRDDARNTVYLQMNSLKPEDTAVYYCNVNGVAQNRLSEYWGQGTQVTVSS

SEQ ID NO: 12292 - protein, 120 aa, synthetic construct
EVQLVESGGGLVQAGDSLRLSCTASGVSDSGVEMGWFRQAPGKEREFVASISMRSVHTYYADSVKGRFTISRDDARNTVYLQMNSLKPEDTAVYYCNVTLLRLSRFREYWGQGTQVTVSS

SEQ ID NO: 12293 - protein, 117 aa, synthetic construct
EVQLVESGGGLVQAGDSLRLSCTASGGCLDVLEMGWFRQAPGKEREFVASISGFDFYTYYADSVKGRFTISRDDARNTVYLQMNSLKPEDTAVYYCNVTDLMFVEYWGQGTQVTVSS

SEQ ID NO: 12294 - protein, 120 aa, synthetic construct
EVQLVESGGGLVQAGDSLRLSCTASGCRLRMIEMGWFRQAPGKEREFVASISVNDSSTYYADSVKGRFTISRDDARNTVYLQMNSLKPEDTAVYYCNVTVFVLGNFIEYWGQGTQVTVSS

SEQ ID NO: 12295 - protein, 121 aa, synthetic construct
EVQLVESGGGLVQAGDSLRLSCTASGGSVYVIEMGWFRQAPGKEREFVASISGAKDYTYYADSVKGRFTISRDDARNTVYLQMNSLKPEDTAVYYCNVCVVSSIAGFEEYWGQGTQVTVSS

SEQ ID NO: 12296 - protein, 121 aa, synthetic construct
EVQLVESGGGLVQAGDSLRLSCTASGSTNSVVEMGWFRQAPGKEREFVASISARNRYTYYADSVKGRFTISRDDARNTVYLQMNSLKPEDTAVYYCNVTTIIDWRIVIEYWGQGTQVTVSS

SEQ ID NO: 12297 - protein, 115 aa, synthetic construct
EVQLVESGGGLVQAGDSLRLSCTASGQGVILEAMGWFRQAPGKEREFVASISGTYYADSVKGRFTISRDDARNTVYLQMNSLKPEDTAVYYCNVLWMMGAWTEYWGQGTQVTVSS

SEQ ID NO: 12298 - protein, 118 aa, synthetic construct
EVQLVESGGGLVQAGDSLRLSCTASGINGVWWMGWFRQAPGKEREFVASISVPYRHTYYADSVKGRFTISRDDARNTVYLQMNSLKPEDTAVYYCNVLDRNLGHDEYWGQGTQVTVSS

SEQ ID NO: 12299 - protein, 122 aa, synthetic construct
EVQLVESGGGLVQAGDSLRLSCTASGDITGIVEMGWFRQAPGKEREFVASISAHSDYTYYADSVKGRFTISRDDARNTVYLQMNSLKPEDTAVYYCNVTVFEYLRWGWLEYWGQGTQVTVSS

SEQ ID NO: 12300 - protein, 123 aa, synthetic construct
EVQLVESGGGLVQAGDSLRLSCTASGERVVGVGMGWFRQAPGKEREFIASISTRFPLTYYADSVKGRFTISRDDARNTVYLQMNSLKPEDTAVYYCNVVWVVADLVIPMGEYWGQGTQVTVSS

SEQ ID NO: 12301 - protein, 120 aa, synthetic construct
EVQLVESGGGLVQAGDSLRLSCTASGELECVVEMGWFRQAPGKEREFVASISGSHVYTYYADSVKGRFTISRDDARNTVYLQMNSLKPEDTAVYYCNVVSFLDMRLCEYWGQGTQVTVSS

SEQ ID NO: 12302 - protein, 121 aa, synthetic construct
EVQLVESGGGLVQAGDSLRLSCTASGMEGDLVEMGWFRQAPGKEREFVASISGSWGHTYYADSVKGRFTISRDDARNTVYLQMNSLKPEDTAVYYCNVTLLSVTRDFREYWGQGTQVTVSS

SEQ ID NO: 12303 - protein, 120 aa, synthetic construct
EVQLVESGGGLVQAGDSLRLSCTASGLMRQALEMGWFRQAPGKEREFVASISVVNIYTYYADSVKGRFTISRDDARNTVYLQMNSLKPEDTAVYYCNVTQLNGCGFFEYWGQGTQVTVSS

SEQ ID NO: 12304 - protein, 121 aa, synthetic construct
EVQLVESGGGLVQAGDSLRLSCTASGGAITVFDMGWFRQAPGKEREFVASISMRGNVTYHADSVKGRFTISRDDARNTVYLQMNSLKPEDTAVYYCNVHLRTGVLMFVEYWGQGTQVTVSS

SEQ ID NO: 12305 - protein, 119 aa, synthetic construct
EVQLVESGGGLVQAGDSLRLSCTASGSTLQILEMGWFRQAPGKEREFVASISGHRTGTYYADSVKGRFTISRDDARNTVYLQMNSLKPEDTAVYYCNVTIVMMGFHEYWGQGTQVTVSS

SEQ ID NO: 12306 - protein, 119 aa, synthetic construct
EVQLVESGGGLVQAGDSLRLSCTASGPGTLIVEMGWFRQAPGKEREFVASISGTKRYTYYADSVKGRFTISRDDARNTVYLQMNSLKPEDTAVYYCNVVICELRFKEYWGQGTQVTVSS

SEQ ID NO: 12307 - protein, 123 aa, synthetic construct
EVQLVESGGGLVQAGDSLRLSCTASGLRGTVLEMGWFRQAPGKEREFVASISQVTAYTYYADSVKGRFTISRDDARNTVYLQMNSLKPEDTAVYYCNVMTVNIGINCMFREYWGQGTQVTVSS

SEQ ID NO: 12308 - protein, 120 aa, synthetic construct
EVQLVESGGGLVQAGDSLRLSCTASGNVKNKVEMGWFRQAPGKEREFVASISCWTTYTYYADSVKGRFTISRDDARNTVYLQMNSLKPEDTAVYYCNVVVVVGWAFLEYWGQGTQVTVSS

SEQ ID NO: 12309 - protein, 117 aa, synthetic construct
EVQLVESGGGLVQAGDSLRLSCTASGNVDRILEMGWFRQAPGKEREFVASISAGDVYTYYADSVKGRFTISRDDARNTVYLQMNSLKPEDTAVYYCNVTSVMFAEYWGQGTQVTVSS

SEQ ID NO: 12310 - protein, 121 aa, synthetic construct
EVQLVESGGGLVQAGDSLRLSCTASGIVKGVIEMGWFRQAPGKEREFVASISWGRADTYYADSVKGRFTISRDDARNTVYLQMNSLKPEDTAVYYCNVTQVLASWGFFEYWGQGTQVTVSS

SEQ ID NO: 12311 - protein, 120 aa, synthetic construct
EVQLVESGGGLVQAGDSLRLSCTASGVMVVIVYMGWFRQAPGKEREFVASISGELDRTYYADSVKGRFTISRDDARNTVYLQMNSLKPEDTAVYYCNVVNFGNVGFGEYWGQGTQVTVSS

SEQ ID NO: 12312 - protein, 119 aa, synthetic construct
EVQLVESGGGLVQAGDSLRLSCTASGPCTHMISMDWFRQAPGKEREFVASISINRVYTYYADSVKGRFTISRDDARNTVYLQMNSLKPEDTAVYYCNVIIMADRFREYWGQGTQVTVSS

SEQ ID NO: 12313 - protein, 117 aa, synthetic construct
EVQLVESGGGLVQAGDSLRLSCTASGKLGRLLEMGWFRQAPGKEREFVASISMVAVYTYYADSVKGRFTISRDDARNTVYLQMNSLKPEDTAVYYCNVVSRWFDEYWGQGTQVTVSS

SEQ ID NO: 12314 - protein, 121 aa, synthetic construct
EVQLVESGGGLVQAGDSLRLSCTASGMTRIQLEMGWFRQAPGKEREFVASISGSKNYTYYADSVKGRFTISRDDARNTVYLQMNSLKPEDTAVYYCNVVCLSSYGDFVEYWGQGTQVTVSS

SEQ ID NO: 12315 - protein, 120 aa, synthetic construct
EVQLVESGGGLVQAGDSLRLSCTASGQLMRVMEMGWFRQAPGKEREFVASISGGHASTYYADSVKGRFTISRDDARNTVYLQMNSLKPEDTAVYYCNVTVIGNQQFFEYWGQGTQVTVSS

SEQ ID NO: 12316 - protein, 120 aa, synthetic construct
EVQLVESGGGLVQAGDSLRLSCTASGSWRFIWWMGWFRQAPGKEREFVASISGIAVNTYYADSVKGRFTISRDDARNTVYLQMNSLKPEDTAVYYCNVIAGVRLDILEYWGQGTQVTVSS

SEQ ID NO: 12317 - protein, 120 aa, synthetic construct
EVQLVESGGGLVQAGDSLRLSCTASGHSNGRIEMGWFRQAPGKEREFVASISVAWSNTYYADSVKGRFTISRDDARNTVYLQMNSLKPEDTAVYYCNVTVICGMGKVEHWGQGTQVTVSS

SEQ ID NO: 12318 - protein, 120 aa, synthetic construct
EVQLVESGGGLVQAGDSLRLSCTASGRWREVVDMSWFRQAPGKEREFVASISGRKDYTYYADSVKGRFTISRDDARNTVYLQMNSLKPEDTAVYYCNVVMFVLFMFAEYWGQGTQVTVSS

SEQ ID NO: 12319 - protein, 121 aa, synthetic construct
EVQLVESGGGLVQAGDSLRLSCTASGMGCTCLEMGWFRQAPGKEREFVASISVNLVYTYYADSVKGRFTISRDDARNTVYLQMNSLKPEDTAVYYCNVSTFKEGGAFGEYWGQGTQVTVSS

SEQ ID NO: 12320 - protein, 124 aa, synthetic construct
EVQLVESGGGLVQAGDSLRLSCTASGRDNRVVEMGWFRQAPGKEREFVASISGVGVFTYYADSVKGRFTISRDDARNTVYLQMNSLKPEDTAVYYCNVTLAGVVSTRLVFFEYWGQGTQVTVSS

SEQ ID NO: 12321 - protein, 121 aa, synthetic construct
EVQLVESGGGLVQAGDSLRLSCTASGIAGNLLEMGWFRQAPGKEREFVASISGGSVYTYYADSVKGRFTISRDDARNTVYLQMNSLKPEDTAVYYCNVVVVRVSYALVEYWGQGTQVTVSS

SEQ ID NO: 12322 - protein, 124 aa, synthetic construct
EVQLVESGGGLVQAGDSLRLSCTASGHRIVFREMGWFRQAPGKEREFVASISFWYSGTYYSDSVKGRFTISRDDARNTVYLQMNSLKPEDTAVYYCNVTAVDYTRMGAFIDEYWGQGTQVTVSS

SEQ ID NO: 12323 - protein, 120 aa, synthetic construct
EVQLVESGGGLVQAGDSLRLSCTASGQCRQVIEMGWFRQAPGKEREFVASISGHGADTYYADSVKGRFTISRDDARNTVYLQMNSLKPEDTAVYYCNVTNYVSIGFVEYWGQGTQVTVSS

SEQ ID NO: 12324 - protein, 119 aa, synthetic construct
EVQLVESGGGLVQAGDSLRLSCTASGFINGVLEMGWFRQAPGKEREFVASISNVSVYTYYADSVKGRFTISRDDARNTVYLQMNSLKPEDTAVYYCWFCTIDRMFREYWGQGTQVTVSS

SEQ ID NO: 12325 - protein, 118 aa, synthetic construct
EVQLVESGGGLVQAGDSLRLSCTASGVKGTCIEMGWFRQAPGKEREFVASISGFHQDTYYADSVKGRFTISRDDARNTVYLQMNSLKPEDTAVYYCNVVMQSTPLEYWGQGTQVTVSS

SEQ ID NO: 12326 - protein, 122 aa, synthetic construct
EVQLVESGGGLVQAGDSLRLSCTASGTEGIIMEMGWFRQAPGKEREFVASISVRHAITYYADSVKGRFTISRDDARNTVYLQMNSLKPEDTAVYYCNVSALIVMPCAKIEYWGQGTQVTVSS

SEQ ID NO: 12327 - protein, 124 aa, synthetic construct
EVQLVESGGGLVQAGDSLRLSCTASGTGRMFVEMGWFRQAPGQEREFVASISGNLVYTYYADSVKGRFTISRDDARNTVYLQMNSLKPEDTAVYYCNVVVLMFPGLGAAFGEYWGQGTQVTVSS

SEQ ID NO: 12328 - protein, 125 aa, synthetic construct
EVQLVESGGGLVQAGDSLRLSCTASGRAKHCVEMGWFRQAPGKEREFVASISASTDYTYYADSVKGRFTISRDDARNTVYLQMNSLKPEDTAVYYCNVSSIDSNARDGILLREYWGQGTQVTVSS

SEQ ID NO: 12329 - protein, 125 aa, synthetic construct
EVQLVESGGGLVQAGDSLRLSCTASGTKANVVEMGWFRQAPGQEREFVASISGSTRYTYYADSVKGRFTISRDDARNTVYLQMNSLKPEDTAVYYCNVSGILRSSDKYFRIIEYWGQGTQVTVSS

SEQ ID NO: 12330 - protein, 121 aa, synthetic construct
EVQLVESGGGLVQAGDSLRLSCTASGSGVVLIEMGWFRQAPGKEREFVASISGISIYTYYADSVKGRFTISRDDARNTVYLQMNSLKPEDTAVYYCNVSVIGGNGAKTEYWGQGTQVTVSS

SEQ ID NO: 12331 - protein, 120 aa, synthetic construct
EVQLVESGGGLVQAGDSLRLSCTASGFPGIQLEMGWFRQAPGKEREFVASISVKQTYTYYADSVKGRFTISRDDARNTVYLQMNSLKPEDTAVYYCNVTGLTNRGLLEYWGQGTQVTVSS

SEQ ID NO: 12332 - protein, 122 aa, synthetic construct
EVQLVESGGGLVQAGDSLRLSCTASGHIHQLLEMGWFRQAPGKEREFVASISGFGGGTYYADSVKGRFTISRDGARNTVYLQMNSLKPEDTAVYYCNVGSNEIVDSGMIEYWGQGTQVTVSS

SEQ ID NO: 12333 - protein, 123 aa, synthetic construct
EVQLVESGGGLVQAGDSLRLSCTASGFVGVMLEMGWFRQAPGKEREFVASISTLGAVTYYADSVKGRFTISRDDARNTVYLQMNSLKPEDTAVYYCNVTGVYVLQGHGFWEYWGQGTQVTVSS

SEQ ID NO: 12334 - protein, 124 aa, synthetic construct
EVQLVESGGGLVQAGDSLRLSCTASGMDVLEGQMGWFRQAPGKEREFVASISSTGMVTYYADSVKGRFTISRDDARNTVYLQMNSLKPEDTAVYYCNVLGFKVSVHVCMFVEYWGQGTQVTVSS

SEQ ID NO: 12335 - protein, 119 aa, synthetic construct
EVQLVESGGGLVQAGDSLRLSCTASGVTRRVLEMGWFRQAPGKEREFVASISEVRKYTYYADSVKGRFTISRDDARNTVYLQMNSLKPEDTAVYYCNVTVFGHGFQEYWGQGTQVTVSS

SEQ ID NO: 12336 - protein, 118 aa, synthetic construct
EVQLVESGGGLVQAGDSLRLSCTASGAVRVVSPMGWFRQAPGKEREFVAVLSHGTYYADSVKGRFTISRDDARNTVYLQMNSLKPEDTAVYYCNVGTVDTVGTWREYWGQGTQVTVSS

SEQ ID NO: 12337 - protein, 125 aa, synthetic construct
EVQLVESGGGLVQAGDSLRLSCTASGLVGHVLEMGWFRQAPGKEREFVASISGRVMYTYYADSVKGRFTISRDDARNTVYLQMNSLKPEDTAVYYCNVLTTVSGDFQVFNRNEYWGQGTQVTVSS

SEQ ID NO: 12338 - protein, 120 aa, synthetic construct
EVQLVESGGGLVQAGDSLRLSCTASGHVKGWVDMGWFRQAPGKEREFVASISRNSTYTYYADSVKGRFTISRDDARNTVYLQMNSLKPEDTAVYYCNVWITTNWEFREYWGQGTQVTVSS

SEQ ID NO: 12339 - protein, 119 aa, synthetic construct
EVQLVESGGGLVQAGDSLRLSCTASGGLEYVLEMGWFRQAPGKEREFVASISIRSDYTYYADSVKGRFTISRDDARNTVYLQMNSLKPEDTAVYYCNVTTFDGGIFEYWGQGTQVTVSS

SEQ ID NO: 12340 - protein, 120 aa, synthetic construct
EVQLVESGGGLVQAGDSLRLSCTASGVKRVMVEMGWFRQAPGKEREFVASISATDYATYYADSVKGRFTISRDDARNTVYLQMNSLKPEDTAVYYCNVTVVREWAFDEYWGQGTQVTVSS

SEQ ID NO: 12341 - protein, 123 aa, synthetic construct
EVQLVESGGGLVQAGDSLRLSCTASGCLTWIEMGWFRQAPGKEREFVASISGTVGHTYYADSVKGRFTISRDDARNTVYLQMNSLKPEDTAVYYCNVTMIKKANDMMRFEEYWGQGTQVTVSS

SEQ ID NO: 12342 - protein, 120 aa, synthetic construct
EVQLVESGGGLVQAGDSLRLSCTASGGERCSIDMGWFRQAPGKEREFVASISVRGHYTYYADSVKGRFTISRDDARNTVYLQMNSLKPEDTAVYYCNVTAVAQKRFQEYWGQGTQVTVSS

SEQ ID NO: 12343 - protein, 120 aa, synthetic construct
EVQLVESGGGLVQAGDSLRLSCTASGGKRAWLEMGWFRQAPGKEREFVASISGRLEYTYYADSVKGRFTISRDDARNTVYLQMNSLKPEDTAVYYCNVTIVLHTGLVEYWGQGTQVTVSS

SEQ ID NO: 12344 - protein, 121 aa, synthetic construct
EVQLVESGGGLVQAGDSLRLSCTASGVHGSPLEMGWFRQAPGKEREFVASISVRDLDTYYADSVKGRFTISRDDARNTVYLQMNSLKPEDTAVYYCNVSIVNKGGMFGEYWGQGTQVTVSS

SEQ ID NO: 12345 - protein, 120 aa, synthetic construct
EVQLVESGGGLVQAGDSLRLSCTASGGVIVEDWMGWFRQAPGKEREFVASISDDGRDTYYADSVKGRFTISRDDARNTVYLQMNSLKPEDTAVYYCNVGWVRNVEHFKYWGQGTQVTVSS

SEQ ID NO: 12346 - protein, 119 aa, synthetic construct
EVQLVESGGGLVQAGDSLRLSCTASGMATVIVEMGWFRQAPGKEREFVASISGGTMATYYADSVKGRFTISRDDARNTVYLQMNSLKPEDTAVYYCNVTGFRRVFSEYWGQGTQVTVSS

SEQ ID NO: 12347 - protein, 119 aa, synthetic construct
EVQLVESGGGLVQAGDSLRLSCTASGHIRRVIEMGWFRQAPGKEREFVASISTAAGYTYYADSVKGRFTISRDDARNTVYLQMNSLKPEDTAVYYCNVTAWNILIDEYWGQGTQVTVSS

SEQ ID NO: 12348 - protein, 121 aa, synthetic construct
EVQLVESGGGLVQAGDSLRLSCTASGMMAKGLEMGWFRQAPGKEREFVASISLRYVGTYYADSVKGRFTISRDDARNTVYLQMNSLKPEDTAVYYCNVTIWDDVTGFFEYWGQGTQVTVSS

SEQ ID NO: 12349 - protein, 121 aa, synthetic construct
EVQLVESGGGLVQAGDSLRLSCTASGYVGRRDQMGWFRQAPGKEREFVASISGVGDPTYYADSVKGRFTISRDDARNTVYLQMNSLKPEDTAVYYCNVAIIRVCTMFGEYWGQGTQVTVSS

SEQ ID NO: 12350 - protein, 120 aa, synthetic construct
EVQLVESGGGLVQAGDSLRLSCTASGGLLNVIEMGWFRQAPGKEREFVASISNDDLYTYYADSVKGRFTISRDDARNTVYLQMNSLKPEDTAVYYCNVVDFTHGGKAEYWGQGTQVTVSS

SEQ ID NO: 12351 - protein, 122 aa, synthetic construct
EVQLVESGGGLVQAGDSLRLSCTASGVTHRVLEMGWFRQAPGKEREFVASISGDEIYTYYADSVKGRFTISRDDARNTVYLQMNSLKPEDTAVYYCNVMSLIAATGVFSEYWGQGTQVTVSS

SEQ ID NO: 12352 - protein, 121 aa, synthetic construct
EVQLVESGGGLVQAGDSLRLSCTASGARNHIVEMGWFRQAPGKEREFVASISGRTQYTYYADSVKGRFTISRDDARNTVYLQMNSLKPEDTAVYYCNVMMYLETWVLKEYWGQGTQVTVSS

SEQ ID NO: 12353 - protein, 124 aa, synthetic construct
EVQLVESGGGLVQAGDSLRLSCTASGVVVTPMEMGWFRQAPGKEREFVASISWGSQYTYYADSVKGRFTISRDDARNTVYLQMNSLKPEDTAVYYCNVSVLLVRHDVITIKEYWGQGTQVTVSS

SEQ ID NO: 12354 - protein, 120 aa, synthetic construct
EVQLVESGGGLVQAGDSLRLSCTASGRKQRIMEMGWFRQAPGKEREFVASISGGLGYTYYADSVKGRFTISRDDARNTVYLQMNSLKPEDTAVYYCNVTVFAACGLDEYWGQGTQVTVSS

SEQ ID NO: 12355 - protein, 117 aa, synthetic construct
EVQLVESGGGLVQAGDSLRLSCTASGHGRMLMEMGWFRQAPGKEREFVASISVHQIYTYYADSVKGRFTISRDDARNTVYLQMNSLKPEDTAVYYCNVTSIRCSEYWGQGTQVTVSS

SEQ ID NO: 12356 - protein, 121 aa, synthetic construct
EVQLVESGGGLVQAGDSLRLSCTASGTNEAVIELGWFRQAPGKEREFVASISGRGELTYYADSVKGRFTISRDDARNTVYLQMNSLKPEDTAVYYCNVTALRTTSGFTEYWGQGTQVTVSS

SEQ ID NO: 12357 - protein, 120 aa, synthetic construct
EVQLVESGGGLVQAGDSLRLSCTASGVSNAILEMGWFRQAPGKEREFVASISSLSAYTYYADSVKGRFTISRDDARNTVYLQMNSLKPEDTAVYYCNVTYFMANSFWEYWGQGTQVTVSS

SEQ ID NO: 12358 - protein, 122 aa, synthetic construct
EVQLVESGGGLVQAGDSLRLSCTASGLKGIQLEMGWFRQAPGKEREFVASISVGRSYTYYADSDKGRFTISRDDARNTVYLQMNSLKPEDTAVYYCNVTVLLVKEPYKYEYWGQGTQVTVSS

SEQ ID NO: 12359 - protein, 120 aa, synthetic construct
EVQLVESGGGLVQAGDSLRLSCTASGIVDNVIEMGWFRQAPGKEREFVASISGTRTVTYYADSVKGRFTISRDDARNTVYLQMNSLKPEDTAVYYCNVTLVRARGFSEYWGQGTQVTVSS

SEQ ID NO: 12360 - protein, 119 aa, synthetic construct
EVQLVESGGGLVQAGDSLRLSCTASGSLSNILEMGWFRQAPGKEREFVASISAMGGYTYYADSVKGRFTISRDDARNTVYLQMNSLKPEDTAVYYCNVTVMSMSFIEYWGQGTQVTVSS

SEQ ID NO: 12361 - protein, 120 aa, synthetic construct
EVQLVESGGGLVQAGDSLRLSCTASGGIIGVLEMGWFRQAPGKEREFVASISGYSCFTYYADSVKGRFTISRDDARNTVYLQMNSLKPEDTAVYYCNVTVFRFGRLSEYWGQGTQVTVSS

SEQ ID NO: 12362 - protein, 120 aa, synthetic construct
EVQLVESGGGLVQAGDSLRLSCTASGGIDSVVEMGWFRQAPGKEREFVASISGRSLYTYYADSVKGRFTISRDDARNTVYLQMNSLKPEDTAVYYCNVTFLNGRGISEYWGQGTQVTVSS

SEQ ID NO: 12363 - protein, 121 aa, synthetic construct
EVQLVESGGGLVQAGDSLRLSCTASGGFGELMEMGWVRQAPGKGREFVASISIVSVYTYYADSVKGRFTISRDDARNTVYLQMNSLKPEDTAVYYCNVVRYNRVAHFVEYWGQGTQVTVSS

SEQ ID NO: 12364 - protein, 120 aa, synthetic construct
EVQLVESGGGLVQAGDSLRLSCTASGIHHIVVEMGWFRQAPGKEREFVASISNSDIYTYYADSVKGRFTISRDDARNTVYLQMNSLKPEDTAVYYCNVVTRASWDFLEYWGQGTQVTVSS

SEQ ID NO: 12365 - protein, 123 aa, synthetic construct
EVQLVESGGGLVQAGDSLRLSCTASGVCGVGIEMGWFRQAPGKEREFVASISVRWGDTYYADSVKGRFTISRDDARNTVYLQMNSLKPEDTAVYYCNVTSWDSKSTAGFTEYWGQGTQVTVSS

SEQ ID NO: 12366 - protein, 119 aa, synthetic construct
EVQLVESGGGLVQAGDSLRLSCTASGKLRNELEMGWFRQAPGKEREFVASISAIGALTYYADSVKGRFTISRDDARNTVYLQMNSLKPEDTAVYYCRMTIVLAGFWEYWGQGTQVTVSS

SEQ ID NO: 12367 - protein, 121 aa, synthetic construct
EVQLVESGGGLVQAGDSLRLSCTASGLSRLFGVMGWFRQAPGKEREFVASISMLHQVTYYADSVKGRFTISRDDARNTVYLQMNSLKPEDTAVYYCNVIIISEEVGRMEYWGQGTQVTVSS

SEQ ID NO: 12368 - protein, 112 aa, synthetic construct
EVQLVESGGGLVQAGDSLRLSCTASGVNTVFRNIGWFRQAPGKEREFVASISDFHEVTYYADSVKGRFTISRDDARNTVYLQMNSLKPEDTAVYYCNVPEYWGQGTQVTVSS

SEQ ID NO: 12369 - protein, 120 aa, synthetic construct
EVQLVESGGGLVQAGDSLRLSCTASGLRDRFLEMGWFRQAPGKEREFVASISVRRSYTYYADSVKGRFTISRDDARNTVYLQMNSLKPEDTAVYYCNVTCVYGYALLEYWGQGTQVTVSS

SEQ ID NO: 12370 - protein, 125 aa, synthetic construct
EVQLVESGGGLVQAGDSLRLSCTASGARGVMVEMGWFRQAPGKEREFVASISGRDGVTYYADSVKGRFTISRDDARNTVYLQMNSLKPEDTAVYYCNVTCIGVNELMMLEFMEYWGQGTQVTVSS

SEQ ID NO: 12371 - protein, 117 aa, synthetic construct
EVQLVESGGGLVQAGDSLRLSCTASGHRIVFTDMGWFRQAPGKEREFVASISGFLIDTYYADSVKGRFTISRDDARNTVYLQMNSLKPEDTAVYYCNVLMSTRTEYWGQGTQVTVSS

SEQ ID NO: 12372 - protein, 123 aa, synthetic construct
EVQLVESGGGLVQAGDSLRLSCTASGIGLSLIEMGWFRQAPGKEREFVASISCRHNYTYYADSVKGRFTISRDDARNTVYLQMNSLKPEDTAVYYCNVTSIMVGASAVIMEYWGQGTQVTVSS

SEQ ID NO: 12373 - protein, 122 aa, synthetic construct
EVQLVESGGGLVQAGDSLRLSCTASGRLTRVMEMGWFRQAPGKEREFVASISGMYHYTYYADSVKGRFTISRDDARNTVYLQMNSLKPEDTAVYYCNVTMFDVNTIFIKEYWGQGTQVTVSS

SEQ ID NO: 12374 - protein, 120 aa, synthetic construct
EVQLVESGGGLVQAGDSLRLSCTASGLDGKFILMGWFRQAPGKEREFVASISYPHHVTYYADSVKGRFTISRDDARNTVYLQMNSLKPEDTAVYYCNVWILCWLDGSEYWGQGTQVTVSS

SEQ ID NO: 12375 - protein, 119 aa, synthetic construct
EVQLVESGGGLVQAGDSLRLSCTASGDMGQSLEMGWFRQAPGKEREFVASISFGTPYTYYADSVKGRFTISRDDARNTVYLQMNSLKPEDTAVYYCNVTAFTDTFTEYWGQGTQVTVSS

SEQ ID NO: 12376 - protein, 121 aa, synthetic construct
EVQLVESGGGLVQAGDSLRLSCTASGSVVRVLEMGWFRQAPGKEREFVASISDHRIYTYYADSVKGRFTISRDDARNTVYLQMNSLKPEDTAVYYCNVTVCGHAASFAEYWGQGTQVTVSS

SEQ ID NO: 12377 - protein, 120 aa, synthetic construct
EVQLVESGGGLVQAGDSLRLSCTASGIKGVRIEMGWFRQAPGKEREFVASISVAFDETYYADSVKGRFTISRDDARNTVYLQMNSLKPEDTAVYYCNVTVFGGKAFAEYWGQGTQVTVSS

SEQ ID NO: 12378 - protein, 120 aa, synthetic construct
EVQLVESGGGLVQAGDSLRLSCTASGRDDGHVEMGWFRQAPGKEREFVASISVRHFETYYADSVKGRFTISRDDARNTVYLQMNSLKPEDTAVYYCNVTVVTAFCFMEYWGQGTQVTVSS

SEQ ID NO: 12379 - protein, 121 aa, synthetic construct
EVQLVESGGGLVQAGDSLRLSCTASGILESVLEMGWFRQAPGKEREFVASISGGGLYTYYADSVKGRFTISRDDARNTVYLQMNSLKPEDTAVYYCNVVVHTATDRFHEYWGQGTQVTVSS

SEQ ID NO: 12380 - protein, 121 aa, synthetic construct
EVQLVESGGGLVQAGDSLRLSCTASGIEARMVEMGWFRQAPGKEREFVASISYAGTYTYYADSVKGRFTISRDDARNTVYLQMNSLKPEDTAVYYCNVIVVSWSGLFVEYWGQGTQVTVSS

SEQ ID NO: 12381 - protein, 122 aa, synthetic construct
EVQLVESGGGLVQAGDSLRLSCTASGGIPLIVDMGWFRQAPGKEREFVASISNRREYTYYADSVKGRFTISRDDARNTVYLQMNSLKPEDTAVYYCNVSILDLRGARFLEYWGQGTQVTVSS

SEQ ID NO: 12382 - protein, 120 aa, synthetic construct
EVQLVESGGGLVQAGDSLRLSCTASGVHMIIVEMGWFRQAPGKEREFVASISGGVLYTYYADSVKGRFTISRDDARNTVYLQMNSLKPEDTAVYYCNVTAFQSGRLYEYWGQGTQVTVSS

SEQ ID NO: 12383 - protein, 119 aa, synthetic construct
EVQLVESGGGLVQAGDSLRLSCTASGGIRDVMEMGWFRQAPGKEREFVASISKSLEYTYYADSVKGRFTISRDDARNTVYLQMNSLKPEDTAVYYCNVTVKRTRFVEYWGQGTQVTVSS

SEQ ID NO: 12384 - protein, 119 aa, synthetic construct
EVQLVESGGGLVQAGDSLRLSCTASGRIMGGLEMGWFRQAPGKEREFVASISVRDNGTYYADSVKGRFTISRDDARNTVYLQMNSLKPEDTAVYYCNVTAMHASKHEYWGQGTQVTVSS

SEQ ID NO: 12385 - protein, 120 aa, synthetic construct
EVQLVESGGGLVQAGDSLRLSCTASGHVQSFVEMGWFRQAPGKEREFVASISRNVGYTYYADSVKGRFTISRDDARNTVYLQMNSLKPEDTAVYYCNVSVFDVWVFAEYWGQGTQVTVSS

SEQ ID NO: 12386 - protein, 121 aa, synthetic construct
EVQLVESGGGLVQAGDSLRLSCTASGGMVITIEMGWFRQAPGKEREFVASISGGGQYTYYADSVKGRFTISRDDARNTVYLQMNSLKPEDTAVYYCNVLVQTNQAMIREYWGQGTQVTVSS

SEQ ID NO: 12387 - protein, 119 aa, synthetic construct
EVQLVESGGGLVQAGDSLRLSCTASGNRHSIIEMGWFRQAPGKEREFVASISMGATYTYYADSVKGRFTISRDDARNTVYLQMNSLKPEDTAVYYCNVVILRGTFLEYWGQGTQVTVSS

SEQ ID NO: 12388 - protein, 119 aa, synthetic construct
EVQLVESGGGLVQAGDSLRLSCTASGGLALQIRMGWFRQAPGKEREFVASISKECGPTYYADSVKGRFTISRDDARNTVYLQMNSLKPEDTAVYYCNVTYWAREMVEYWGQGTQVTVSS

SEQ ID NO: 12389 - protein, 120 aa, synthetic construct
EVQLVESGGGLVQAGDSLRLSCTASGMNGIMMEMGWFRQAPGKEREFVASISVRNVMTYYADSVKGRFTISRDDARNTVYLQMNSLKPEDTAVYYCNVTVLDNIRFSEYWGQGTQVTVSS

SEQ ID NO: 12390 - protein, 121 aa, synthetic construct
EVQLVESGGGLVQAGDSLRLSCTASGVVNRILAMDWFRQAPGKEREFVASISSQGDVTYYADSVKGRFTISRDDARNTVYLQMNSLKPEDTAVYYCNVTCLDARGAFGEYWGQGTQVTVSS

SEQ ID NO: 12391 - protein, 119 aa, synthetic construct
EVQLVESGGGLVQAGDSLRLSCTASGRFGELIEMGWFRQAPGKEREFVASISFSAFYTYYADSVKGRFTISRDDARNTVYLQMNSLKPEDTAVYYCNVAVFGGGFKEYWGQGTQVTVSS

SEQ ID NO: 12392 - protein, 120 aa, synthetic construct
EVQLVESGGGLVQAGDSLRLSCTASGVLLGSIEMGWFRQAPGKEREFVASISCKNVYTYYADSVKGRFTISRDDARNTVYLQMNSLKPEDTAVYYCNVICIHVDRFVEYWGQGTQVTVSS

SEQ ID NO: 12393 - protein, 123 aa, synthetic construct
EVQLVESGGGLVQAGDSLRLSCTASGIIGLTVEMGWFRQAPGKEREFVASISCVGAYTYYADSVKGRFTISRDDARNTVYLQMNSLKPEDTAVYYCNVTVFAGTGLVMFGEYWGQGTQVTVSS

SEQ ID NO: 12394 - protein, 111 aa, synthetic construct
EVQLVESGGGLVQAGDSLRLSCTASGGRLGSDWMGWFRQAPGKEREFVAVIARHSLTYYADSVKGRFTISRDDARNTVYLQMNSLKPEDTAVYYCNVVEYWGQGTQVTVSS

SEQ ID NO: 12395 - protein, 120 aa, synthetic construct
EVQLVESGGGLVQAGDSLRLSCTASGINRNSIEMGWFRQAPGKEREFVASISIKGNNTYYADSVKGRFTISRDDARNTVYLQMNSLKPEDTAVYYCNVTSLGSMGKLEYWGQGTQVTVSS

SEQ ID NO: 12396 - protein, 122 aa, synthetic construct
EVQLVESGGGLVQAGDSLRLSCTASGDIYHVIEMGWFRQAPGKEREFVASISNSSVYTYYADSVKGRFTISRDDARNTVYLQMNSLKPEDTAVYYCNVVGRSSERLGFREYWGQGTQVTVSS

SEQ ID NO: 12397 - protein, 120 aa, synthetic construct
EVQLVESGGGLVQAGDSLRLSCTASGHRIVFREMGWFRQAPGKEREFVASISATRLYTYYADSVKGRFTISRDDARNTVYLQMNSLKPEDTAVYYCNVTVVRRLNFHEYWGQGTQVTVSS

SEQ ID NO: 12398 - protein, 117 aa, synthetic construct
EVQLVESGGGLVQAGDSLRLSCTASGVLDVFIEMGWFRQAPGKEREFVASISGARRYTYYADSVKGRFTISRDDARNTVYLQMNSLKPEDTAVYYCNVTGYNFAEYWGQGTQVTVSS

SEQ ID NO: 12399 - protein, 120 aa, synthetic construct
EVQLVESGGGLVQAGDSLRLSCTASGDIPGALEMGWFRQAPGKEREFVASISARNTYTYYADSVKGRFTISRDDARNTVYLQMNSLKPEDTAVYYCNVMGVREGEVTEYWGQGTQVTVSS

SEQ ID NO: 12400 - protein, 119 aa, synthetic construct
EVQLVESGGGLVQAGDSLRLSCTASGKVPGVIEMGWFRQAPGKEREFVASISARGRATYYADSVKGRFTISRDDARNTVYLQMNSLKPEDTAVYYCNVTALGVMFVEYWGQGTQVTVSS

SEQ ID NO: 12401 - protein, 119 aa, synthetic construct
EVQLVESGGGLVQAGDSLRLSCTASGIGAWILEMGWFRQAPGKEREFVASISGNTRYTYYADSVKGRFTISRDDARNTVYLQMNSLKPEDTAVYYCNVSVHQVLILEYWGQGTQVTVSS

SEQ ID NO: 12402 - protein, 122 aa, synthetic construct
EVQLVESGGGLVQAGDSLRLSCTASGPKRIIVEMGWFRQAPGKEREFVASISGGSEYTYYADSVKGRFTISRDDARNTVYLQMNSLKPEDTAVYYCNVWTVAALSRQFHEYWGQGTQVTVSS

SEQ ID NO: 12403 - protein, 119 aa, synthetic construct
EVQLVESGGGLVQAGDSLRLSCTASGNRGNMMEMGWFRQAPGKEREFVASISVACRYTYYADSVKGRFTISRDDARNTVYLQMNSLKPEDTAVYYCNVSTFQEVLVEYWGQGTQVTVSS

SEQ ID NO: 12404 - protein, 124 aa, synthetic construct
EVQLVESGGGLVQAGDSLRLSCTASGLANGFMEMGWFRQAPGKEREFVASISENVYYTYYADSVKGRFTISRDDARNTVYLQMNSLKPEDTAVYYCNVTALERGSVMIQVREYWGQGTQVTVSS

SEQ ID NO: 12405 - protein, 118 aa, synthetic construct
EVQLVESGGGLVQAGDSLRLSCTASGQGKLVIEMGWFRQAPGKEREFVASISGFGHDTYYADSVKGRFTISRDDARNTVYLQMNSLKPEDTAVYYCNVDAQVGVIEYWGQGTQVTVSS

SEQ ID NO: 12406 - protein, 124 aa, synthetic construct
EVQLVESGGGLVQAGDSLRLSCTASGCEMKVLEMGWFRQAPGKEREFVASISGVSDYTYYADSVKGRFTISRDDARNTVYLQMNSLKPEDTAVYYCNVVAVCTDLEGVTIREYWGQGTQVTVSS

SEQ ID NO: 12407 - protein, 120 aa, synthetic construct
EVQLVESGGGLVQAGDSLRLSCTASGPIRGSIEMGWFRQAPGKEREFVASISVRRVYTYYADSVKGRFTISRDDARNTVYLQMNSLKPEDTAVYYCNVVVITGGAFEEYWGQGTQVTVSS

SEQ ID NO: 12408 - protein, 121 aa, synthetic construct
EVQLVESGGGLVQAGDSLRLSCTASGVGDVIMEMGWFRQAPGKEREFVASISGIGDNTYYADSVKGRFTISRDDARNTVYLQMNSLKPEDTAVYYCNVTRFDACGYFIEYWGQGTQVTVSS

SEQ ID NO: 12409 - protein, 123 aa, synthetic construct
EVQLVESGGGLVQAGDSLRLSCTASGRVVKVVEMGWFRQAPGKEREFVASISGMGCLTYYADSVKGRFTISRDDARNTVYLQMNSLKPEDTAVYYCNVETWCIGRSIVFIEYWGQGTQVTVSS

SEQ ID NO: 12410 - protein, 123 aa, synthetic construct
EVQLVESGGGLVQAGDSLRLSCTASGARHGVLEMGWFRQAPGKEREFVASISGTTEYTYYADSVKGRFTISRDDARNTVYLQMNSLKPEDTAVYYCNVTHIDCEAVLHIMEYWGQGTQVTVSS

SEQ ID NO: 12411 - protein, 125 aa, synthetic construct
EVQLVESGGGLVQAGDSLRLSCTASGQQNDVIEMGWFRQAPGKEREFVASISGSITYTYYADSVKGRFTISRDDARNTVYLQMNSLKPEDTAVYYCNVTIIGHKGNGQMLINEYWGQGTQVTVSS

SEQ ID NO: 12412 - protein, 117 aa, synthetic construct
EVQLVESGGGLVQAGDSLRLSCTASGVFVRKGWMGWFRQAPGKEREFVASIWIDMSTYYADSVKGRFTISRDDARNTVYLQMNSLKPEDTAVYYCNVIDMGQWVEYWGQGTQVTVSS

SEQ ID NO: 12413 - protein, 121 aa, synthetic construct
EVQLVESGGGLVQAGDSLRLSCTASGKVYGMVVMGWFRQAPGKEREFVASISARTASTYYADSVKGRFTISRDDARNTVYLQMNSLKPEDTAVYYCNVLVAGGDVVWREYWGQGTQVTVSS

SEQ ID NO: 12414 - protein, 121 aa, synthetic construct
EVQLVESGGGLVQAGDSLRLSCTASGVAGGLVEMGWFRQAPGKEREFVASISGQGTYTYYADSVKGRFTISRDDARNTVYLQMNSLKPEDTAVYYCNVSVLTPVTWVLEYWGQGTQVTVSS

SEQ ID NO: 12415 - protein, 119 aa, synthetic construct
EVQLVESGGGLVQAGDSLRLSCTASGSLSNVIEMGWFRQAPGKEREFVASISGGMGSTYYADSVKGRFTISRDDARNTVYLQMNSLKPEDTAVYYCNVTRMMLRKEEYWGQGTQVTVSS

SEQ ID NO: 12416 - protein, 120 aa, synthetic construct
EVQLVESGGGLVQAGDSLRLSCTASGAHERFLEMGWFRQAPGKEREFVASISGVSTYTYYADSVKGRFTISRDDARNTVYLQMNSLKPEDTAVYYCNVTKLSMSLIAEYWGQGTQVTVSS

SEQ ID NO: 12417 - protein, 120 aa, synthetic construct
EVQLVESGGGLVQAGDSLRLSCTASGKMDLILEMGWFRQAPGKEREFVASISRRSEYTYYADSVKGRFTISRDDARNTVYLQMNSLKPEDTAVYYCNMVSVGVQSFGEYWGQGTQVTVSS

SEQ ID NO: 12418 - protein, 119 aa, synthetic construct
EVQLVESGGGLVQAGDSLRLSCTASGMLKGLIEMGWFRQAPGKEREFVASISVNHDRTYYADSVKGRFTISRDDARNTVYLQMNSLKPEDTAVYYCNVTCIARRVAEYWGQGTQVTVSF

SEQ ID NO: 12419 - protein, 120 aa, synthetic construct
EVQLVESGGGLVQAGDSLRLSCTASGFHDVIIEMGWFHQAPGKEREFVASISNGNDYTYYADSVKGRFTISRDDARNTVYLQMNSLKPEDTAVYYCNVTSRGLRGFTEYWGQGTQVTVSS

SEQ ID NO: 12420 - protein, 119 aa, synthetic construct
EVQLVESGGGLVQAGDSLRLSCTASGNDGRIIEMGWFRQAPGKEREFVASISARTVYTYYADSVKGRFTISRDDARNTVYLQMNSLKPEDTAVYYCNVTVLDMYAREYWGQGTQVTVSS

SEQ ID NO: 12421 - protein, 118 aa, synthetic construct
EVQLVESGGGLVQAGDSLRLSCTASGRSVEIMRMGWFRQAPGKEREFVASISNGSCCTYYADSVKGRFTISRDDARNTVYLQMNSLKPEDTAVYYCNVLKVSPIQEYWGQGTQVTVSS

SEQ ID NO: 12422 - protein, 120 aa, synthetic construct
EVQLVESGGGLVQAGDSLRLSCTASGQHRQHLEMGWFRQAPGKEREFVASISGSDGYTYYADSVKGRFTISRDDARNTVYLQMNSLKPEDTAVYYCNVTDLHQFGFVEYWGQGTQVTVSS

SEQ ID NO: 12423 - protein, 120 aa, synthetic construct
EVQLVESGGGLVQAGDSLRLSCTASGVWANSIEMGWFRQAPGKEREFVASISTFARLTYYADSVKGRFTISRDDARNTVYLQMNSLKPEDTAVYYCNVTGIDRDGFWEYWGQGTQVTVSS

SEQ ID NO: 12424 - protein, 119 aa, synthetic construct
EVQLVESGGGLVQAGDSLRLSCTASGYLRAVLRMGWFRQAPGKEREFVASISVGSTNTYYADSVKGRFTISRDDARNTVYLQMNSLKPEDTAVYYCNVFTPSLQFMEYWGQGTQVTVSS

SEQ ID NO: 12425 - protein, 120 aa, synthetic construct
EVQLVESGGGLVQAGDSLRLSCTASGLGKVTVEMGWFRQAPGKEREFVASISGLSAYTYYADSVKGRFTISRDDARNTVYLQMNSLKPEDTAVYYCNVAAISCSGFVEYWGQGTQVTVSS

SEQ ID NO: 12426 - protein, 122 aa, synthetic construct
EVQLVESGGGLVQAGDSLRLSCTASGALRDVIEMGWFRQAPGKEREFVASISGTDFWTYYADSVKGRFTISRDDARNTVYLQMNSLKPEDTAVYYCNVVVLRFILRKFVEYWGQGTQVTVSS

SEQ ID NO: 12427 - protein, 119 aa, synthetic construct
EVQLVESGGGLVQAGDSLRLSCTASGTRDTVIFMGWFRQAPGKEREFVASISTRAARTYYADSVKGRFTISRDDARNTVYLQMNSLKPEDTAVYYCNVLGFFETSAEYWGQGTQVTVSS

SEQ ID NO: 12428 - protein, 125 aa, synthetic construct
EVQLVESGGGLVQAGDSLRLSCTASGEVKVVLEMGWFRQAPGKEREFVASISGRARYTYYADSVKGRFTISRDDARNTVYLQMNSLKPEDTAVYYCNVVVIVNDGTTIAGFREYWGQGTQVTVSS

SEQ ID NO: 12429 - protein, 120 aa, synthetic construct
EVQLVESGGGLVQAGDSLRLSCTASGRGVHLIEMGWFRQAPGKEREFVASISAHVAYTYYADSVKGRFTISRDDARNTVYLQMNSLKPEDTAVYYCNVLCVLEGRVLEYWGQGTQVTVSS

SEQ ID NO: 12430 - protein, 120 aa, synthetic construct
EVQLVESGGGLVQAGDSLRLSCTASGSSGGMVEMGWFRQAPGKEREFVASISAAYVYTYYADSVKGRFTISRDDARNTVYLQMNSLKPEDTAVYYCNVATVVDMKFREYWGQGTQVTVSS

SEQ ID NO: 12431 - protein, 117 aa, synthetic construct
EVQLVESGGGLVQAGDSLRLSCTASGNLSRYWMMGWFRQAPGKEREFVASISGIWDGTYYADSVKGRFTISRDDARNTVYLQMNSLKPEDTAVYYCNVEFLTVDEYWGQGTQVTVSS

SEQ ID NO: 12432 - protein, 121 aa, synthetic construct
EVQLVESGGGLVQAGDSLRLSCTASGPVLTVVEMGWFRQAPGKEREFVASISGSTTYTYYADSVKGRFTISRDDARNTVYLQMNSLKPEDTAVYYCNVAVMDTVGVFWEYWGQGTQVTVSS

SEQ ID NO: 12433 - protein, 123 aa, synthetic construct
EVQLVESGGGLVQAGDSLRLSCTASGGRFELIEMGWFRQAPGKEREFVASISGISTYTYYADSVKGRFTISRDDARNTVYLQMNSLKPEDTAVYYCNVIVLVRRDMIRFQEYWGQGTQVTVSS

SEQ ID NO: 12434 - protein, 117 aa, synthetic construct
EVQLVESGGGLVQAGDSLRLSCTASGLQILVALMGWFRQAPGKEREFVASISGKLTGTYYADSVKGRFTISRDDARNTVYLQMNSLKPEDTAVYYCNVLAFPWTEYWGQGTQVTVSS

SEQ ID NO: 12435 - protein, 120 aa, synthetic construct
EVQLVESGGGLVQAGDSLRLSCTASGNDRTCIEMGWFRQAPGKEREFVASISGLYIATYYADSVKGRFTISRDDARNTVYLQMNSLKPEDTAVYYCNVTTFNGFNFSEYWGQGTQVTVSS

SEQ ID NO: 12436 - protein, 120 aa, synthetic construct
EVQLVESGGGLVQAGDSLRLSCTASGGVGMVVDMGWFRQAPGKEREFVASISGSAVYTYYADSVKGRFTISRDDARNTVYLQMNSLKPEDTAVYYCNVTQLRAMGFVEYWGQGTQVTVSS

SEQ ID NO: 12437 - protein, 120 aa, synthetic construct
EVQLVESGGGLVQAGDSLRLSCTASGNRRRILEMGWFRQAPGKEREFVASISTNMDYTYYADSVKGRFTISRDDARNTVYLQMNSLKPEDTAVYYCNVTAINRGMFNEYWGQGTQVTVSS

SEQ ID NO: 12438 - protein, 121 aa, synthetic construct
EVQLVESGGGLVQAGDSLRLSCTASGRSRWCLEMGWFRQAPGKEREFVASISGNLNTTYYADSVKGRFTISRDDARNTVYLQMNSLKPEDTAVYYCNVTEWSRARMFEEYWGQGTQVTVSS

SEQ ID NO: 12439 - protein, 116 aa, synthetic construct
EVQLVESGGGLVQAGDSLRLSCTASGLEGRVIKMGWFRQAPGKEREFVASSGFNFTYYADSVKGRFTISRDDARNTVYLQMNSLKPEDTAVYYCNVLGISPISEYWGQGTQVTVSS

SEQ ID NO: 12440 - protein, 121 aa, synthetic construct
EVQLVESGGGLVQAGDSLRLSCTASGAKGNVVEMGWFRQAPGKEREFVASISSSAEYTYYADSVKGRFTISRDDARNTVYLQMNSLKPEDTAVYYCNVVVFGRRLGFREYWGQGTQVTVSS

SEQ ID NO: 12441 - protein, 121 aa, synthetic construct
EVQLVESGGGLVQAGDSLRLSCTASGYRGSVIEMGWFRQAPGKEREFVASISGRGTYTYYADSVKGRFTISRDDARNTVYLQMNSLKPEDTAVYYCNVSVIGIVKPLEEYWGQGTQVTVSS

SEQ ID NO: 12442 - protein, 119 aa, synthetic construct
EVQLVESGGGLVQAGDSLRLSCTASGIVEGVMEMGWFRQAPGKEREFVASISSQADYTYYADSVKGRFTISRDDARNTVYLQMNSLKPEDTAVYYCNVTAVTRGFVEYWGQGTQVTVSS

SEQ ID NO: 12443 - protein, 119 aa, synthetic construct
EVQLVESGGGLVQAGDSLRLSCTASGISGMIIEMGWFRQAPGKEREFVASISSTKASTYYADSVKGRFTISRDDARNTVYLQMNSLKPEDTAVYYCNVTALGVRFSEYWGQGTQVTVSS

SEQ ID NO: 12444 - protein, 120 aa, synthetic construct
EVQLVESGGGLVQAGDSLRLSCTASGDPIAILEMGWFRQAPGKEREFVASISGIRFQTYYADSVKGRFTISRDDARNTVYLQMNSLKPEDTAVYYCNVTVVRVHRFVEYWGQGTQVTVSS

SEQ ID NO: 12445 - protein, 121 aa, synthetic construct
EVQLVESGGGLVQAGDSLRLSCTASGLSGVFLEMGWFRQAPGKEREFVASISRNSATTYYADSVKGRFTISRDDARNTVYLQMNSLKPEDTAVYYCNVTIWLVDAGFKEYWGQGTQVTVSS

SEQ ID NO: 12446 - protein, 120 aa, synthetic construct
EVQLVESGGGLVQAGDSLRLSCTASGVTDGILEMGWFRQAPGKEREFVASISRRGGSTYYADSVKGRFTISRDDARNTVYLQMNSLKPEDTAVYYCNVTMFLRMGFFEYWGQGTQVTVSS

SEQ ID NO: 12447 - protein, 121 aa, synthetic construct
EVQLVESGGGLVQAGDSLRLSCTASGIAYKAFEMGWFRQAPGKEREFVASISVREGDTYYADSVKGRFTISRDDARNTVYLQMNSLKPEDTAVYYCNVSTFMHSAGKNEYWGQGTQVTVSS

SEQ ID NO: 12448 - protein, 121 aa, synthetic construct
EVQLVESGGGLVQAGDSLRLSCTASGIARRVLEMGWFRQAPGKEREFVASISGTNEYTYYADSVKGRFTISRDDARNTVYLQMNSLKPEDTAVYYCNVVLVNMTWFMEEYWGQGTQVTVSS

SEQ ID NO: 12449 - protein, 119 aa, synthetic construct
EVQLVESGGGLVQAGDSLRLSCTASGMGGIWLEMGWFRQAPGKEREFVASISSRMAYTYYADSVKGRFTISRDDARNTVYLQMNSLKPEDTAVYYCNVTILSAKLVEYWGQGTQVTVSS

SEQ ID NO: 12450 - protein, 120 aa, synthetic construct
EVQLVESGGGLVQAGDSLRLSCTASGRAGRVLEMGWFRQAPGKEREFVASISVRGTYTYYADSVKGRFTISRDDARNTVYLQMNSLKPEDTAVYYCNVLSIDDGGVFEYWGQGTQVTVSS

SEQ ID NO: 12451 - protein, 120 aa, synthetic construct
EVQLVESGGGLVQAGDSLRLSCTASGHWVQVLEMGWFRQAPGKEREFVASISGLTVYTYYADSVKGRFTISRDDARNTVYLQMNSLKPEDTAVYYCNVTQVKDWGFFEYWGQGTQVTVSS

SEQ ID NO: 12452 - protein, 120 aa, synthetic construct
EVQLVESGGGLVQAGDSLRLSCTASGSRFVFQMMGWFRQAPGKEREFVASISGFRTVTYYADSVKGRFTISRDDARNTVYLQMNSLKPEDTAVYYCNVIGHGMLTVPEYWGQGTQVTVSS

SEQ ID NO: 12453 - protein, 120 aa, synthetic construct
EVQLVESGGGLVQAGDSLRLSCTASGCMGRYFEMGWFRQAPGKEREFVASISGSGMYTYYADSVKGRFTISRDDARNTVYLQMNSLKPEDTAVYYCNVSCFRHFKIDEYWGQGTQVTVSS

SEQ ID NO: 12454 - protein, 120 aa, synthetic construct
EVQLVESGGGLVQAGDSLRLSCTASGKAVTGVEMGWFRQAPGKEREFVASISGRGSYTYYADSVKGRFTISRDDARNTVYLQMNSLKPEDTAVYYCNVSVFHDGRVGEYWGQGTQVTVSS

SEQ ID NO: 12455 - protein, 120 aa, synthetic construct
EVQLVESGGGLVQAGDSLRLSCTASGNGINYLEMGWFRQAPGKEREFVASISTRAAYTYYADSVKGRFTISRDDARNTVYLQMNSLKPEDTAVYYCNVSELNCKGLVEYWGQGTQVTVSS

SEQ ID NO: 12456 - protein, 119 aa, synthetic construct
EVQLVESGGGLVQAGDSLRLSCTASGAARDYVGMGWFRQAPGKEREFVASISGWSGFTYYADSVKGRFTISRDDARNTVYLQMNSLKPEDTAVYYCNVALFDRHLGEYWGQGTQVTVSS

SEQ ID NO: 12457 - protein, 120 aa, synthetic construct
EVQLVESGGGLVQAGDSLRLSCTASGDSGRALEMGWFRQAPGKEREFVASISVRMLDTYYADSVKGRFTISRDDARNTVYLQMNSLKPEDTAVYYCNVTVIMVHRFHEYWGQGTQVTVSS

SEQ ID NO: 12458 - protein, 120 aa, synthetic construct
EVQLVESGGGLVQAGDSLRLSCTASGTKGVTVEMGWFRQAPGKEREFVASISGFRIYTYYADSVKGRFTISRDDARNTVYLQMNSLKPEDTAVYYCNVVGCKAGMFKEYWGQGTQVTVSS

SEQ ID NO: 12459 - protein, 119 aa, synthetic construct
EVQLVESGGGLVQAGDSLRLSCTASGIGESWMEMGWFRQAPGKEREFVASISGVRCYTYYADSVKGRFTISRDDARNTVYLQMNSLKPEDTAVYYCNVTVVGAGIREYWGQGTQVTVSS

SEQ ID NO: 12460 - protein, 120 aa, synthetic construct
EVQLVESGGGLVQAGDSLRLSCTASGKGRNMLEMGWFRQAPGKEREFVASISGNHTTTYYADSVKGRFTISRDDARNTVYLQMNSLKPEDTAVYYCNVTVLKVAGFQEYWGQGTQVTVSS

SEQ ID NO: 12461 - protein, 122 aa, synthetic construct
EVQLVESGGGLVQAGDSLRLSCTASGLKRILEMGWFRQAPGKEREFVASISGSTWYTYYADSVKGRFTISRDDARNTVYLQMNSLKPEDTAVYYCNVTQSGGVAGALFQEYWGQGTQVTVSS

SEQ ID NO: 12462 - protein, 120 aa, synthetic construct
EVQLVESGGGLVQAGDSLRLSCTASGAMHKRMEMGWFRQAPGKEREFVASISFVGVETYYADSVKGRFTISRDDARNTVYLQMNSLKPEDTAVYYCNVTVVAVASFLEYWGQGTQVTVSS

SEQ ID NO: 12463 - protein, 124 aa, synthetic construct
EVQLVESGGGLVQAGDSLRLSCTASGTTMDVLEMGWFRQAPGKEREFVASISGYTVYTYYADSVKGRFTISRDDARNTVYLQMNSLKPEDTAVYYCNVVTIVQTGYSFMVREYWGQGTQVTVSS

SEQ ID NO: 12464 - protein, 119 aa, synthetic construct
EVQLVESGGGLVQAGDSLRLSCTASGRAVRIIEMGWFRQAPGKEREFVASISGVGFFTYYADSVKGRFTISRDDARNTVYLQMNSLKPEDTAVYYCNVTTLTNVLEEYWGQGTQVTVSS

SEQ ID NO: 12465 - protein, 121 aa, synthetic construct
EVQLVESGGGLVQAGDSLRLSCTASGTIAGIIEMGWFRQAPGKEREFVASISAEANYTYYADSVKGRFTISRDDARNTVYLQMNSLKPEDTAVYYCNVTGIIVGMRLREYWGQGTQVTVSS

SEQ ID NO: 12466 - protein, 117 aa, synthetic construct
EVQLVESGGGLVQAGDSLRLSCTASGNRGDWIRMGWFRQAPGKEREFVASISTNTVHTYYADSVKGRFTISRDDARNTVYLQMNSLKPEDTAVYYCNVLVRAWVEYWGQGTQVTVSS

SEQ ID NO: 12467 - protein, 120 aa, synthetic construct
EVQLVESGGGLVQAGDSLRLSCTASGSAHGMLEMGWFRQAPGKEREFVASISVRGLSTYYADSVKGRFTISRDDARNTVYLQMNSLKPEDTAVYYCNAAGISIAGFFEYWGQGTQVTVSS

SEQ ID NO: 12468 - protein, 120 aa, synthetic construct
EVQLVESGGGLVQAGDSLRLSCTASGNLSKVVEMGWFRQAPGKEREFVASISGTDSGTYYADSVKGRFTISRDDARNTVYLQMNSLKPEDTAVYYCNVMTYVNRSFVEYWGQGTQVTVSS

SEQ ID NO: 12469 - protein, 120 aa, synthetic construct
EVQLVESGGGLVQAGDSLRLSCTASGSTMVVLEMGWFRQAPGKEREFVASISGTGELTYYADSVKGRFTISRDDARNTVYLQMNSLKPEDTAVYYCNVTVVVTRHFVEYWGQGTQVTVSS

SEQ ID NO: 12470 - protein, 119 aa, synthetic construct
EVQLVESGGGLVQAGDSLRLSCTASGVVNIIEMGWFRQAPGKEREFVASISGSSGYTYYADSVKGRFTISRDDARNTVYLQMNSLKPEDTAVYYCNVTQLDWAHRVEYWGQGTQVTVSS

SEQ ID NO: 12471 - protein, 124 aa, synthetic construct
EVQLVESGGGLVQAGDSLRLSCTASGSAGHVVEMGWFRQAPGKEREFVASISGQDHMTYYADSVKGRFTISRDDARNTVYLQMNSLKPEDTAVYYCNVTAMPGFGMIVGFAEYWGQGTQVTVSS

SEQ ID NO: 12472 - protein, 123 aa, synthetic construct
EVQLVESGGGLVQAGDSLRLSCTASGRLRRTLEMGWFRQAPGKEREFVASISGNDWYTYYADSVKGRFTISRDDARNTVYLQMNSLKPEDTAVYYCNVTVLSVQTMFGLEEYWGQGTQVTVSS

SEQ ID NO: 12473 - protein, 123 aa, synthetic construct
EVQLVESGGGLVQAGDSLRLSCTASGLDGICTVMGWFRQAPGKEREFVASISGAGISTYYADSVKGRFTISRDDARNTVYLQMNSLKPEDTAVYYCNVAVWSLDLKYRFAEYWGQRTQVTVSS

SEQ ID NO: 12474 - protein, 120 aa, synthetic construct
EVQLVESGGGLVQAGDSLRLSCTASGTNGLVLEMGWFRQAPGKEREFVASISGNEVYTYYADSVKGRFTISRDDARNTVYLQMNSLKPEDTAVYYCNVTRFFAFVLEEYWGQGTQVTVSS

SEQ ID NO: 12475 - protein, 120 aa, synthetic construct
EVQLVESGGGLVQAGDSLRLSCTASGSGHERIEMGWFRQAPGKEREFVASISGRTAYTYYADSVKGRFTISRDDARNTVYLQMNSLKPEDTAVYYCNVSVMIDVRILEYWGQGTQVTVSS

SEQ ID NO: 12476 - protein, 120 aa, synthetic construct
EVQLVESGGGLVQAGDSLRLSCTASGRMVGGVEMGWFRQAPGKEREFVASISYQGAYTYYADSVKGRFTISRDDARNTVYLQMNSLKPEDTAVYYCNVSTLVSSRFLEYWGQGTQVTVSS

SEQ ID NO: 12477 - protein, 125 aa, synthetic construct
EVQLVESGGGLVQAGDSLRLSCTASGMGGDIMEMGWFRQAPGKEREFVASISGEGAITYYADSVKGRFTISRDDARNTVYLQMNSLKPEDTAVYYCNVTSCIFRDLKIIGFSEYWGQGTQVTVSS

SEQ ID NO: 12478 - protein, 120 aa, synthetic construct
EVQLVESGGGLVQAGDSLRLSCTASGLMGNIIEMGWFRQAPGKEREFVASISIRLGFTYYADSVKGRFTISRDDARNTVYLQMNSLKPEDTAVYYCNVTVFSMGMFGEYWGQGTQVTVSS

SEQ ID NO: 12479 - protein, 122 aa, synthetic construct
EVQLVESGGGLVQAGDSLRLSCTASGGTKDVLEMGWFRQAPGKEREFVASISSNNAYTYYADSVKGRFTISRDDARNTVYLQMNSLKPEDTAVYYCNVGSYDAVARRFVEYWGQGTQVTVSS

SEQ ID NO: 12480 - protein, 121 aa, synthetic construct
EVQLVESGGGLVQAGDSLRLSCTASGVVALIVEMGWFRQAPGKEREFVASISSNAHYTYYADSVKGRFTISRDDARNTVYLQMNSLKPEDTAVYYCNVMGLGRRGNIVEYWGQGTQVTVSS

SEQ ID NO: 12481 - protein, 122 aa, synthetic construct
EVQLVESGGGLVQAGDSLRLSCTASDRLSMRVDMGWFRQAPGKEREFVASISVNHSVTYYADSVKGRFTISRDDARNTVYLQMNSLKPEDTAVYYCNVTVLNLMSCRFVEYWGQGTQVTVSS

SEQ ID NO: 12482 - protein, 119 aa, synthetic construct
EVQLVESGGGLVQAGDSLRLSCTASGDMPHVVEMGWFRQAPGKEREFVASISRDGGYTYYADSVKGRFTISRDDARNTVYLQMNSLKPEDTAVYYCNVTEFRVVKLEYWGQGTQVTVSS

SEQ ID NO: 12483 - protein, 121 aa, synthetic construct
EVQLVESGGGLVQAGDSLRLSCTASGVVGTLVDMGWFRQAPGKEREFVASISGMCANTYYADSVKGRFTISRDDARNTVYLQMNSLKPEDTAVYYCNVTVIVHKVGFQEYWGQGTQVTVSS

SEQ ID NO: 12484 - protein, 117 aa, synthetic construct
EVQLVESGGGLVQAGDSLRLSCTASGSMHFTTLMGWFRQAPGKEREFVASISTMDVATYYADSVKGRFTISRDDARNTVYLQMNSLKPEDTAVYYCNVCVFDIREYWGQGTQVTVSS

SEQ ID NO: 12485 - protein, 122 aa, synthetic construct
EVQLVESGGGLVQAGDSLRLSCTASGRRATLLEMGWFRQAPGKEREFVASISGISIYTYYADSVKGRFTISRDDARNTVYLQMNSLKPEDTAVYYCNVTTRKDIGVGFLEYWGQGTQVTVSS

SEQ ID NO: 12486 - protein, 123 aa, synthetic construct
EVQLVESGGGLVQAGDSLRLSCTASGDRRPVVEMGWFRQAPGKEREFVASISGTKVATYYADSVKGRFTISRDDARNTVYLQMNSLKPEDTAVYYCNVTLYDVYLRHRFIEYWGQGTQVTVSS

SEQ ID NO: 12487 - protein, 121 aa, synthetic construct
EVQLVESGGGLVQAGDSLRLSCTASGMRARVMEMGWFRQAPGKEREFVASISAADRYTYYADSVKGRFTISRDDARNTVYLQMNSLKPEDTAVYYCNVTGILSCVIIVEYWGQGTQVTVSS

SEQ ID NO: 12488 - protein, 124 aa, synthetic construct
EVQLVESGGGLVQAGDSLRLSCTASGLEGPMIEMGWFRQAPGKEREFVASISGNGASTYYADSVKGRFTISRDDARNTVYLQMNSLKPEDTAVYYCNVTVFNIMNYVGKFAEYWGQGTQVTVSS

SEQ ID NO: 12489 - protein, 125 aa, synthetic construct
EVQLVESGGGLVQAGDSLRLSCTASGRCTGVVEMGWFRQAPGKEREFVASISGVRLYTYYADSVKGRFTISRDDARNTVYLQMNSLKPEDTAVYYCNVLIVNNNHSGGLRIGEYWGQGTQVTVSS

SEQ ID NO: 12490 - protein, 120 aa, synthetic construct
EVQLVESGGGLVQAGDSLRLSCTASGMGNGVIEMGWFRQAPGKEREFVASISRLGEYTYYADSVKGRFTISRDDARNTVYLQMNSLKPEDTAVYYCNVTRLQLTRILEYWGQGTQVTVSS

SEQ ID NO: 12491 - protein, 124 aa, synthetic construct
EVQLVESGGGLVQAGDSLRLSCTASGHRSRLVEMGWFRQAPGKEREFVASISSQGEYTYYADSVKGRFTISRDDARNTVYLQMNSLKPEDTAVYYCNVTYIVRSKFAMAFTEYWGQGTQVTVSS

SEQ ID NO: 12492 - protein, 120 aa, synthetic construct
EVQLVESGGGLVQAGDSLRLSCTASGACEAVVEMGWFRQAPGKEREFVASISGTDCYTYYADSVKGRFTISRDDARNTVYLQMNSLKPEDTAVYYCNVVRMRSPGFVEYWGQGTQVTVSS

SEQ ID NO: 12493 - protein, 119 aa, synthetic construct
EVQLVESGGGLVQAGDSLRLSCTASGMVGYIVEMGWFRQAPGKEREFVASISALCGATYYADSVKGRFTISRDDARNTVYLQMNSLKPEDTAVYYCNVTSLHNVFLEYWGQGTQVTVSS

SEQ ID NO: 12494 - protein, 124 aa, synthetic construct
EVQLVESGGGLVQAGDSLRLSCTASGMVVGGFVMGWFRQAPGKEREFVASISSGYVATYYADSVKGRFTISRDDARNTVYLQMNSLKPEDTAVYYCNVRGIVVTNSGCTWVEYWGQGTQVTVSS

SEQ ID NO: 12495 - protein, 120 aa, synthetic construct
EVQLVESGGGLVQAGDSLRLSCTASGIREEILEMGWFRQAPGKEREFVASISAKGQYTYYADSVKGRFTISRDDARNTVYLQMNSLKPEDTAVYYCNVVSTIIARFIEYWGQGTQVTVSS

SEQ ID NO: 12496 - protein, 121 aa, synthetic construct
EVQLVESGGGLVQAGDSLRLSCTASGNGVRVVEMGWFRQAPGKEREFVASISGYGHYTYYADSVKGRFTISQDDARNTVYLQMNSLKPEDTAVYYCNVVVITVNVMLSEYWGQGTQVTVSS

SEQ ID NO: 12497 - protein, 120 aa, synthetic construct
EVQLVESGGGLVQAGDSLRLSCTASGLTEPKLEMGWFRQAPGKEREFVASISMMRAYTYYADSVKGRFTISRDDARNTVYLQMNSLKPEDTAVYYCNVTVIGSRRVGEYWGQGTQVTVSS

SEQ ID NO: 12498 - protein, 122 aa, synthetic construct
EVQLVESGGGLVQAGDSLRLSCTASGALVGMMSMGWFRQAPGKEREFVASISDRIDVTYYADSVKGRFTISRDDARNTVYLQMNSLKPEDTAVYYCNGGHMWWIGGGLLEYWGQGTQVTVSS

SEQ ID NO: 12499 - protein, 120 aa, synthetic construct
EVQLVESGGGLVQAGDSLRLSCTASGRPEHLIEMGWFRQAPGKEREFVASISIRVLYTYYADSVKGRFAISRDDARNTVYLQMNSLKPEDTAVYYCNVVSVFDRGIREYWGQGTQVTVSS

SEQ ID NO: 12500 - protein, 121 aa, synthetic construct
EVQLVESGGGLVQAGDSLRLSCTASGDRRDYLEMGWFRQAPGKEREFVASISSVSIYTYYADSVKGRFTISRDDARNTVYLQMNSLKPEDTAVYYCNVVILRNGGYIREYWGQGTQVTVSS

SEQ ID NO: 12501 - protein, 120 aa, synthetic construct
EVQLVESGGGLVQAGDSLRLSCTASGIKVPVIEMGWFRQAPGKEREFVASISGRVLYTYYADSVKGRFTISRDDARNTVYLQMNSLKPEDTAVYYCNVTVAIDGLIREYWGQGTQVTVSS

SEQ ID NO: 12502 - protein, 124 aa, synthetic construct
EVQLVESGGGLVQAGDSLRLSCTASGIPLSVMEMSWFRQAPGKEREFVASISGMGNYTYYADSVKGRFTISRDDARNTVYLQMNSLKPEDTAVYYCNVLAIRSLKGHFLSAEYWGQGTQVTVSS

SEQ ID NO: 12503 - protein, 123 aa, synthetic construct
EVQLVESGGGLVQAGDSLRLSCTASGLIGTAIEMGWFRQAPGKEREFVASISIGNRYTYYADSVKGRFTISRDDARNTVYLQMNSLKPEDTAVYYCNVLVVHLCDAVRIKEYWGQGTQVTVSS

SEQ ID NO: 12504 - protein, 120 aa, synthetic construct
EVQLVESGGGLVQAGDSLRLSCTASGMGVNVRFMGWFRQAPGKEREFVASISAPTLQTYYADSVKGRFTISRDDARNTVYLQMNSLKPEDTAVYYCNVVLISDYMIREYWGQGTQVTVSS

SEQ ID NO: 12505 - protein, 122 aa, synthetic construct
EVQLVESGGGLVQAGDSLRLSCTASGMSEASVEMGWFRQAPGKEREFVASISVHRGHTYYADSVKGRFTISRDDARNTVYLQMNSLKPEDTAVYYCNVTMVYHSFPWLREYWGQGTQVTVSS

SEQ ID NO: 12506 - protein, 119 aa, synthetic construct
EVQLVESGGGLVQAGDSLRLSCTASGVEVVRGVMGWFRQAPGKEREFVAIMFGVFTYYADSVQGRFTISRDDARNTVYLQMNSLKPEDTAVYYCNVVLSPSNVRRYEYWGQGTQVTVSS

SEQ ID NO: 12507 - protein, 123 aa, synthetic construct
EVQLVESGGGLVQAGDSLRLSCTASGRSSRRVEMGWFRQAPGKEREFVASISCVGTYTYYADSVKGRFTISRDDARNTVYLQMNSLKPEDTAVYYCNVVVCVNVGGLGFIEYWGQGTQVTVSS

SEQ ID NO: 12508 - protein, 123 aa, synthetic construct
EVQLVESGGGLVQAGDSLRLSCTASGIVGSGIEMGWFRQAPGKEREFVASISVRGNATYYADSVKGRFTISRDDARNTVYLQMNSLKPEDTAVYYCNVTVADMRANPYFLEYWGQGTQVTVSS

SEQ ID NO: 12509 - protein, 117 aa, synthetic construct
EVQLVESGGGLVQAGDSLRLSCTASGARHLQIEMGWFRQAPGKEREFVASISCRFSYTYYADSVKGRFTISRDDARNTVYLQMNSLKPEDTAVYYCNVTDENFSEYWGQGTQVTVSS

SEQ ID NO: 12510 - protein, 119 aa, synthetic construct
EVQLVESGGGLVQAGDSLRLSCTASGESYANSWMGWFRQAPGKEREFVASLVWGHTYYADSVKGRFTISRDDARNTVYLQMNSLKPEDTAVYYCNVLDLIERGVWIEYWGQGTQVTVSS

SEQ ID NO: 12511 - protein, 119 aa, synthetic construct
EVQLVESGGGLVQAGDSLRLSCTASGISSRIVEMGWFRQAPGKEREFVASISGWACLTYYADSVKGRFTISRDDARNTVYLQMNSLKPEDTAVYYCNVTGFAMGFEEYWGQGTQVTVSS

SEQ ID NO: 12512 - protein, 120 aa, synthetic construct
EVQLVESGGGLVQAGDSLRLSCTASGHQDSPLEMGWFRQAPGKEREFVASISRSLDYTYYADSVKGRFTISRDDARNTVYLQMNSLKPEDTAVYYCNVTYRSYIFFMEYWGQGTQVTVSS

SEQ ID NO: 12513 - protein, 120 aa, synthetic construct
EVQLVESGGGLVQAGDSLRLSCTASGIMLNPVEMGWFRQAPGKEREFVASISNSEAYTYYADSVKGRFTISRDDARNTVYLQMNSLKPEDTAVYYCNVTAVSWPNVREYWGQGTQVTVSS

SEQ ID NO: 12514 - protein, 124 aa, synthetic construct
EVQLVESGGGLVQAGDSLRLSCTASGRWVDVMEMGWFRQAPGKEREFVASISGQDVYTYYADSVKGRFTISRDDARNTVYLQMNSLKPEDTAVYYCNVTIISVGNCGVSVYEYWGQGTQVTVSS

SEQ ID NO: 12515 - protein, 119 aa, synthetic construct
EVQLVESGGGLVQAGDSLRLSCTASGRVIGVLEMGWFRQAPGKEREFVASISMRGAYTYYADSVKGRFTISRDDARNTVYLQMNSLKPEDTAVYYCNVVVVTHTVNEYWGQGTQVTVSS

SEQ ID NO: 12516 - protein, 121 aa, synthetic construct
EVQLVESGGGLVQAGDSLRLSCTASGSHNKVWWMGWFRQAPGKEREFVASISVKHLVTYYADSVKGRFTISRDDARNTVYLQMNSLKPEDTAVYYCNVIVITQWFDVTEYWGQGTQVTVSS

SEQ ID NO: 12517 - protein, 121 aa, synthetic construct
EVQLVESGGGLVQAGDSLRLSCTASGLTENVMEMGWFRQAPGKEREFVASISYWRNYTYYADSVKGRFTISRDDARNTVYLQMNSLKPEDTAVYYCNVTGISATIGYMEYWGQGTQVTVSS

SEQ ID NO: 12518 - protein, 120 aa, synthetic construct
EVQLVESGGGLVQAGDSLRLSCTASGRFDHLIEMGWFRQAPGKEREFVASISGVDFSTYYADSVKGRFTISRDDARNTVYLQMNSLKPEDTAVYYCNVTYVWSGLFVEYWGQGTQVTVSS

SEQ ID NO: 12519 - protein, 117 aa, synthetic construct
EVQLVESGGGLVQAGDSLRLSCTASGNESIEMGWFRQAPGKEREFVASISTGDDVTYYADSVKGRFTISRDDARNTVYLQMNSLKPEDTAVYYCRLTVLLRGFAEYWGQGTQVTVSS

SEQ ID NO: 12520 - protein, 120 aa, synthetic construct
EVQLVESGGGLVQAGDSLRLSCTASGRTNRVIEMGWFRQAPGKEREFVASISANMQYTYYADSVKGRFTISRDDARNTVYLQMNSLKPEDTAVYYCNVSAVLQGRFREYWGQGTQVTVSS

SEQ ID NO: 12521 - protein, 118 aa, synthetic construct
EVQLVESGGGLVQAGDSLRLSCTASGGSIKNIVMGWFRQAPGKEREFVASISVPWLITYYADSVKGRFTISRDDARNTVYLQMNSLKPEDTAVYYCNVLDLVIWQEYWGQGTQVTVSS

SEQ ID NO: 12522 - protein, 119 aa, synthetic construct
EVQLVESGGGLVQAGDSLRLSCTASGSAEAAIEMGWFRQAPGKEREFVASISGRGAYTYYADSVKGRFTISRDDARNTVYLQMNSLKPEDTAVYYCNVTVIDMYRFEYWGQGTQVTVSS

SEQ ID NO: 12523 - protein, 124 aa, synthetic construct
EVQLVESGGGLVQAGDSLRLSCTASGLGVTILEMGWFRQAPGKEREFVASISANQDYTYYADSVKGRFTISRDDARNTVYLQMNSLKPEDTAVYYCNVVTMDFQAEHMTRREYWGQGTQVTVSS

SEQ ID NO: 12524 - protein, 121 aa, synthetic construct
EVQLVESGGGLVQAGDSLRLSCTASGMPHPLLEMGWFRQAPGKEREFVASISVQEHYTYYADSVKGRFTISRDDARNTVYLQMNSLKPEDTAVYYCNVISISRIKGFSEYWGQGTQVTVSS

SEQ ID NO: 12525 - protein, 121 aa, synthetic construct
EVQLVESGGGLVQAGDSLRLSCTASGIMGFCIEMGWFRQAPGKEREFVASISNVSVYTYYADSVKGRFTISRDDARNTVYLQMNSLKPEDTAVYYCNVVSLLGVEGFIEYWGQGTQVTVSS

SEQ ID NO: 12526 - protein, 121 aa, synthetic construct
EVQLVESGGGLVQAGDSLRLSCTASGTRIVFKSMGWFRQAPGKEREFVASISGFLQLTYYADSVKGRFTISRDDARNTVYLQMNSLKPEDTAVYYCNVDCSVDDVVAVEYWGQGTQVTVSS

SEQ ID NO: 12527 - protein, 119 aa, synthetic construct
EVQLVESGGGLVQAGDSLRLSCTASGIVGTVLEMGWFRQAPGKEREFVASISRSVDYTYYADSVKGRFTISRDDARNTVYLQMNSLKPEDTAVYYCNVTGMMLTILEYWGQGTQVTVSS

SEQ ID NO: 12528 - protein, 121 aa, synthetic construct
EVQLVESGGGLVQAGDSLRLSCTASGRTEEILEMGWFRQAPGKEREFVASISCMREYTYYADSVKGRFTISRDDARNTVYLQMNSLKPEDTAVYYCNVSVLIARGGLLEYWGQGTQVTVSS

SEQ ID NO: 12529 - protein, 121 aa, synthetic construct
EVQLVESGGGLVQAGDSLRLSCTASGGVIGLIEMGWFRQAPGKEREFVASISSNWGYTYYADSVKGRFTISRDDARNTVYLQMNSLKPEDTAVYYCNVIRFYIDIGFMEYWGQGTQVTVSS

SEQ ID NO: 12530 - protein, 121 aa, synthetic construct
EVQLVESGGGLVQAGDSLRLSCTASGGSGRAIEMGWFRQAPGKEREFVASISGGSAYTYYADSVKGRFTISRDDARNTVYLQMNSLKPEDTAVYYCNVSTLDVRGHIREYWGQGTQVTVSS

SEQ ID NO: 12531 - protein, 118 aa, synthetic construct
EVQLVESGGGLVQAGDSLRLSCTASGVHNVWLEMGWFRQAPGKEREFVASISIGNWYTYYADSVKGRFTISRDDARNTVYLQMNSLKPEDTAVYYCNVVSVRAFKEYWGQGTQVTVSS

SEQ ID NO: 12532 - protein, 120 aa, synthetic construct
EVQLVESGGGLVQAGDSLRLSCTASGITGVLMEMGWFRQAPGKEREFVASISTARTYTYYADSVKGRFTISRDDARNTVYLQMNSLKPEDTAVYYCNVAAACITQFREYWGQGTQVTVSS

SEQ ID NO: 12533 - protein, 120 aa, synthetic construct
EVQLVESGGGLVQAGDSLRLSCTASGYGVSWLEMGWFRQAPGKEREFVASISGRDGYTYYADSVKGRFTISRDDARNTVYLQMNSLKPEDTAVYYCNVTIIHLCHLSEYWGQGTQVTVSS

SEQ ID NO: 12534 - protein, 124 aa, synthetic construct
EVQLVESGGGLVQAGDSLRLSCTASGIAAPEHVMGWFRQAPGKEREFVASISSRDLETYYADSVKGRFTISRDDARNTVYLQMNSLKPEDTAVYYCNVVTTWRLFVFWTFLEYWGQGTQVTVSS

SEQ ID NO: 12535 - protein, 121 aa, synthetic construct
EVQLVESGGGLVQAGDSLRLSCTASGGKSFVVEMGWFRQAPGKEREFVASISTRWTYTYYADSVKGRFTISRDDARNTVYLQMNSLKPEDTAVYYCNVTGYLVGIGFSEYWGQGTQVTVSS

SEQ ID NO: 12536 - protein, 124 aa, synthetic construct
EVQLVESGGGLVQAGDSLRLSCTASGNVHYLIEMGWFRQAPGKEREFVASISCRGSYTYYADSVKGRFTISRDDARNTVYLQMNSLKPEDTAVYYCNVTGVQSEAERISMHEYWGQGTQVTVSS

SEQ ID NO: 12537 - protein, 119 aa, synthetic construct
EVQLVESGGGLVQAGDSLRLSCTASGGFGWVMEMGWFRQAPGKGREFVASISGRTFYTYYADSVKGRFTISRDDARNTVYLQMNSLKPEDTAVYYCNVVGFTAVRMEYWGQGTQVTVSS

SEQ ID NO: 12538 - protein, 119 aa, synthetic construct
EVQLVESGGGLVQAGDSLRLSCTASGRTFVFNRMGWFRQAPGKEREFVASISGNGSFTYYADSVKGRFTISRDDARNTVYLQMNSLKPEDTAVYYCNVTMLNVRFSEYWGQGTQVTVSS

SEQ ID NO: 12539 - protein, 119 aa, synthetic construct
EVQLVESGGGLVQAGDSLRLSCTASGPAEGALEMGWFRQAPGKEREFVASISVRRGMTYYADSVKGRFTISRDDARNTVYLQMNSLKPEDTAVYYCNVTLIEHYFYEYWGQGTQVTVSS

SEQ ID NO: 12540 - protein, 120 aa, synthetic construct
EVQLVESGGGLVQAGDSLRLSCTASGQVIVVLEMGWFRQAPGKEREFVASISGNTDGTYYADSVKGRFTISRDDARNTVYLQMNSLKPEDTAVYYCNVTCVMPYLFSEYWGQGTQVTVSS

SEQ ID NO: 12541 - protein, 119 aa, synthetic construct
EVQLVESGGGLVQAGDSLRLSCTASGKCTGCIEMGWFRQAPGKEREFVASISYGVTYTYYADSVKGRFTISRDDARNTVYLQMNSLKPEDTAVYYCNVVVFHRRKHEYWGQGTQVTVSS

SEQ ID NO: 12542 - protein, 123 aa, synthetic construct
EVQLVESGGGLVQAGDSLRLSCTASGRRFVVLEMGWFRQAPGKEREFVASISDDKTYTYYADSVKGRFTISRDDARNTVYLQMNSLKPEDTAVYYCNVTLIVADRFVRFAEYWGQGTQVTVSS

SEQ ID NO: 12543 - protein, 120 aa, synthetic construct
EVQLVESGGGLVQAGDSLRLSCTASGVDGPKLEMGWFRQAPGKEREFVASISTPDRYTYYADSVKGRFTISRDDARNTVYLQMNSLKPEDTAVYYCNVVTVGVGGFVEYWGQGTQVTVSS

SEQ ID NO: 12544 - protein, 121 aa, synthetic construct
EVQLVESGGGLVQAGDSLRLSCTASGYMHKPMEMGWFRQAPGKEREFVASISGYDGYTYYADSVKGRFTISRDDARNTVYLQMNSLKPEDTAVYYCNVVILLENLTFVEYWGQGTQVTVSS

SEQ ID NO: 12545 - protein, 122 aa, synthetic construct
EVQLVESGGGLVQAGDSLRLSCTASGLIDLVVEMGWFRQAPGKEREFVASISGRCAGTYYADSVKGRFTISRDDARNTVYLQMNSLKPEDTAVYYCNVTTLVLERRVFEEYWGQGTQVTVSS

SEQ ID NO: 12546 - protein, 119 aa, synthetic construct
EVQLVESGGGLVQAGDSLRLSCTASGSIAHMVEMGWFRQAPGKEREFVASISSQQITYYADSVKGRFTISRDDARNTVYLQMNSLKPEDTAVYYCNVTCVANHGFREYWGQGTQVTVSS

SEQ ID NO: 12547 - protein, 121 aa, synthetic construct
EVQLVESGGGLVQAGDSLRLSCTASGGAQSLVEMGWFRQAPGKEREFVASISMQSRYTYYADSVKGRFTISRDDARNTVYLQMNSLKPEDTAVYYCNVVFIMQCGPFVEYWGQGTQVTVSS

SEQ ID NO: 12548 - protein, 122 aa, synthetic construct
EVQLVESGGGLVQAGDSLRLSCTASGDIPYKLEMGWFRQAPGKEREFVASISMGRTYTYYADSVKGRFTISRDDARNTVYLQMNSLKPEDTAVYYCNVTALHSATYKVVEYWGQGTQVTVSS

SEQ ID NO: 12549 - protein, 120 aa, synthetic construct
EVQLVESGGGLVQAGDSLRLSCTASGVTGVVIEMGWFRQAPGKEREFVASISMRGVYTYYADSVKGRFTISRDDARNTVYLQMNSLKPEDTAVYYCNVTTCGAGPMREYWGQGTQVTVSS

SEQ ID NO: 12550 - protein, 120 aa, synthetic construct
EVQLVESGGGLVQAGDSLRLSCTASGKSDNVMEMGWFRQAPGKEREFVASISVSGDYTYYADSVKGRFTISRDDARNTVYLQMNSLKPEDTAVYYCNVTVLIKVRPVEYWGQGTQVTVSS

SEQ ID NO: 12551 - protein, 120 aa, synthetic construct
EVQLVESGGGLVQAGDSLRLSCTASGKSVSVMEMGWFRQAPGKEREFVASISKRGAYTYYADSVKGRFTISRDDARNTVYLQMNSLKPEDTAVYYCNVTIFHDIVFVEYWGQGTQVTVSS

SEQ ID NO: 12552 - protein, 118 aa, synthetic construct
EVQLVESGGGLVQAGDSLRLSCTASGVQEISMWMGWFRQAPGKEREFVASIVFGFNTYYADSVKGRFTISRDDARNTVYLQMNSLKPEDTAVYYCNVISSESDWTEYWGQGTQVTVSS

SEQ ID NO: 12553 - protein, 121 aa, synthetic construct
EVQLVESGGGLVQAGDSLRLSCTASGHVLVVMEMGWFRQAPGKEREFVASISGQGSYTYYADSVKGRFTISRDDARNTVYLQMNSLKPEDTAVYYCNVAMLTIRGEIEEYWGQGTQVTVSS

SEQ ID NO: 12554 - protein, 121 aa, synthetic construct
EVQLVESGGGLVQAGDSLRLSCTASGVITQFLEMGWFRQAPGKEREFVASISTLANYTYYADSVKGRFTISRDDARNTVYLQMNSLKPEDTAVYYCNVMGISVSLGFVEYWGQGTQVTVSS

SEQ ID NO: 12555 - protein, 123 aa, synthetic construct
EVQLVESGGGLVQAGDSLRLSCTASGEGQMLLEMGWFRQAPGKEREFVASISIVAQYTYYADSVKGRFTISRDDARNTVYLQMNSLKPEDTAVYYCNVTSIELGTLTRIIEYWGQGTQVTVSS

SEQ ID NO: 12556 - protein, 120 aa, synthetic construct
EVQLVESGGGLVQAGDSLRLSCTASGPQELVVEMGWFRQAPGKEREFVASISGTFTYTYYADSVKGRFTISRDDARNTVYLQMNSLKPEDTAVYYCNVARFSLSRFVEYWGQGTQVTVSS

SEQ ID NO: 12557 - protein, 122 aa, synthetic construct
EVQLVESGGGLVQAGDSLRLSCTASGSYAKNLEMGWFRQAPGKEREFVASISGRRDDTYYADSVKGRFTISRDDARNTVYLQMNSLKPEDTAVYYCNVVIVNTVQMRFDEYWGQGTQVTVSS

SEQ ID NO: 12558 - protein, 122 aa, synthetic construct
EVQLVESGGGLVQAGDSLRLSCTASGSSSQHLEMGWFRQAPGKEREFVASISMQTAYTYYADSVKGRFTISRDDARNTVYLQMNSLKPEDTAVYYCNVTLLVVGRLVILEYWGQGTQVTVSS

SEQ ID NO: 12559 - protein, 120 aa, synthetic construct
EVQLVESGGGLVQAGDSLRLSCTASGVSHISLEMGWFRQAPGKEREFVASISVVAGTTYYADSVKGRFTISRDDARNTVYLQMNSLKPEDTAVYYCNVTAFLRVNFIEYWGQGTQVTVSS

SEQ ID NO: 12560 - protein, 120 aa, synthetic construct
EVQLVESGGGLVQAGDSLRLSCTASGSVKNSLEMGWFRQAPGKEREFVASISTLDGVTYYADSVKGRFTISRDDARNTVYLQMNSLKPEDTAVYYCNVTLFSISVFVEYWGQGTQVTVSS

SEQ ID NO: 12561 - protein, 118 aa, synthetic construct
EVQLVESGGGLVQAGDSLRLSCTASGRIWHVLEMGWFRQAPGKEREFVASISNVSIYTYYADSVKGRFTISRDDARNTVYLQMNSLKPEDTAVYYCNVVTIPTFREYWGQGTQVTVSS

SEQ ID NO: 12562 - protein, 122 aa, synthetic construct
EVQLVESGGGLVQAGDSLRLSCTASGRGRDVIEMGWFRQAPGKEREFVASISGQTRYTYYADSVKGRFTISRDDARNTVYLQMNSLKPEDTAVYYCNVTAVEVVASVITEYWGQGTQVTVSS

SEQ ID NO: 12563 - protein, 120 aa, synthetic construct
EVQLVESGGGLVQAGDSLRLSCTASGRPETVIEMGWFRQAPGKEREFVASISSVVRYTYYADSVKGRFTISRDDARNTVYLQMNSLKPEDTAVYYCNVSSWDVVRFSEYWGQGTQVTVSS

SEQ ID NO: 12564 - protein, 119 aa, synthetic construct
EVQLVESGGGLVQAGDSLRLSCTASGYQGAVVEMGWFRQAPGKEREFVASISNVFIYTYYADSVKGRFTISRDDARNTVYLQMNSLKPEDTAVYYCNVSTILKGFNEYWGQGTQVTVSS

SEQ ID NO: 12565 - protein, 121 aa, synthetic construct
EVQLVESGGGLVQAGDSLRLSCTASGLLTSREMMGWFRQAPGKEREFVASISGNVMGTYYADSVKGRFTISRDDARNTVYLQMNSLKPEDTAVYYCNVRVVRMSITFGEYWGQGTQVTVSS

SEQ ID NO: 12566 - protein, 120 aa, synthetic construct
EVQLVESGGGLVQAGDSLRLSCTASGLNHGMVEMGWFRQAPGKEREFVASISCIDMETYYADSVKGRFTISRDDARNTVYLQMNSLKPEDTAVYYCNVTRVGPSRFMEYWGQGTQVTVSS

SEQ ID NO: 12567 - protein, 118 aa, synthetic construct
EVQLVESGGGLVQAGDSLRLSCTASGDKQYVVDMGWFRQAPGKEREFVASIAKGVYTYYADSVKGRFTISRDDARNTVYLQMNSLKPEDTAVYYCNVTVVRGIVMEYWGQGTQVTVSS

SEQ ID NO: 12568 - protein, 121 aa, synthetic construct
EVQLVESGGGLVQAGDSLRLSCTASGNMSGFLEMGWFRQAPGKEREFVASISERVDYTYYADSVKGRFTISRDDARNTVYLQMNSLKPEDTAVYYCNVTMILLGTGVIEYWGQGTQVTVSS

SEQ ID NO: 12569 - protein, 120 aa, synthetic construct
EVQLVESGGGLVQAGDSLRLSCTASGQDDFMMEMGWFRQAPGKEREFVASISMAYVATYYADSVKGRFTISRDDARNTVYLQMNSLKPEDTAVYYCNVTVARKHDFREYWGQGTQVTVSS

SEQ ID NO: 12570 - protein, 120 aa, synthetic construct
EVQLVESGGGLVQAGDSLRLSCTASGRFLSAIEMGWFRQAPGKEREFVASISKDDAYTYYADSVKGRFTISRDDARNTVYLQMNSLKPEDTAVYYCNVVVCNTHGFVEYWGQGTQVTVSS

SEQ ID NO: 12571 - protein, 120 aa, synthetic construct
EVQLVESGGGLVQAGDSLRLSCTASGRSRIIIEMGWFRQAPGKEREFVASISANGGYTYYADSVKGRFTISRDDARNTVYLQMNSLKPEDTAVYYCNATATLRADIVEYWGQGTQVTVSS

SEQ ID NO: 12572 - protein, 121 aa, synthetic construct
EVQLVESGGGLVQAGDSLRLSCTASGGDRGFIEMGWFRQAPGKEREFVASISGTGDYTYYADSVKGRFTISRDDARNTVYLQMNSLKPEDTAVYYCNVIVFPNGGRAREYWGQGTQVTVSS

SEQ ID NO: 12573 - protein, 119 aa, synthetic construct
EVQLVESGGGLVQAGDSLRLSCTASGVSGTVLEMGWFRQAPGKEREFVASISGVSEWTYYADSVKGRFTISRDDARNTVYLQMNSLKPEDTAVYYCRTTMLTLVLMEYWGQGTQVTVSS

SEQ ID NO: 12574 - protein, 121 aa, synthetic construct
EVQLVESGGGLVQAGDSLRLSCTASGKLGDAVEMGWFRQAPGKEREFVASISYNHRCTYYADSVKGRFTISRDDARNTVYLQMNSLKPEDTAVYYCNVTTHVPCLGFREYWGQGTQVTVSS

SEQ ID NO: 12575 - protein, 119 aa, synthetic construct
EVQLVESGGGLVQAGDSLRLSCTASGQVRGIVEMGWFRQAPGKEREFVASISGVSDYTYYADSVKGRFTISRDDARNTVYLQMNSLKPEDTAVYYCNVTTWSFGVTEYWGQGTQVTVSS

SEQ ID NO: 12576 - protein, 120 aa, synthetic construct
EVQLVESGGGLVQAGDSLRLSCTASGWRTVFQGMGWFRQAPGKEREFVASISGFANTTYYADSVKGRFTISRDDARNTVYLQMNSLKPEDTAVYYCNVDVNERGLVGEYWGQGTQVTVSS

SEQ ID NO: 12577 - protein, 121 aa, synthetic construct
EVQLVESGGGLVQAGDSLRLSCTASGVSGVVVEMGWFRQAPGKEREFVASISGQVYWTYYADSVKGRFTISRDDARNTVYLQMNSLKPEDTAVYYCNVVIHTSRSRFREYWGQGTQVTVSS

SEQ ID NO: 12578 - protein, 120 aa, synthetic construct
EVQLVESGGGLVQAGDSLRLSCTASGIGGGSLEMGWFRQAPGKEREFVASISLKVRYTYYADSVKGRFTISRDDARNTVYLQMNSLKPEDTAVYYCNVMSLDDGRIHEYWGQGTQVTVSS

SEQ ID NO: 12579 - protein, 121 aa, synthetic construct
EVQLVESGGGLVQAGDSLRLSCTASGMCSAVIEMGWFRQAPGKEREFVASISGGKTYTYYADSVKGRFTISRDDARNTVYLQMNSLKPEDTAVYYCNVTAVGVAHTIDEYWGQGTQVTVSS

SEQ ID NO: 12580 - protein, 120 aa, synthetic construct
EVQLVESGGGLVQAGDSLRLSCTASGEVGCRVEMGWFRQAPGKEREFVASISGMGIYTYYADSVKGRFTISRDDARNTVYLQMNSLKPEDTAVYYCNVVYVHSGGLCEYWGQGTQVTVSS

SEQ ID NO: 12581 - protein, 120 aa, synthetic construct
EVQLVESGGGLVQAGDSLRLSCTASGVVYRILEMGWFRQAPGKEREFVASISGVGAYTYYADSVKGRFTISRDDARNTVYLQMNSLKPEDTAVYYCNVTAEGRSAFREYWGQGTQVTVSS

SEQ ID NO: 12582 - protein, 119 aa, synthetic construct
EVQLVESGGGLVQAGDSLRLSCTASGRTDACVEMGWFRQAPGKEREFVASISAGHFYTYYADSVKGRFTISRDDARNTVYLQMNSLKPEDTAVYYCNVTMMMNRVYEYWGQGTQVTVSS

SEQ ID NO: 12583 - protein, 121 aa, synthetic construct
EVQLVESGGGLVQAGDSLRLSCTASGDCRVYVEMGWFRQAPGKEREFVASISGAYFYTYYADSVKGRFTISRDDARNTVYLQMNSLKPEDTAVYYCNVVQFDRVCHKVEYWGQGTQVTVSS

SEQ ID NO: 12584 - protein, 121 aa, synthetic construct
EVQLVESGGGLVQAGDSLRLSCTASGRSRPFIEMGWFRQAPGKEREFVASISRTCSYTYYADSVKGRFTISRDDARNTVYLQMNSLKPEDTAVYYCNVVCTHENVGWREYWGQGTQVTVSS

SEQ ID NO: 12585 - protein, 122 aa, synthetic construct
EVQLVESGGGLVQAGDSLRLSCTASGNALGQMEMGWFRQAPGKEREFVASISVVRGWTYYADSVKGRFTISRDDARNTVYLQMNSLKPEDTAVYYCNVMAFESRRGVMLEYWGQGTQVTVSS

SEQ ID NO: 12586 - protein, 119 aa, synthetic construct
EVQLVESGGGLVQAGDSLRLSCTASGVSAMIIEMGWFRQAPGKEREFVASISMQGNLTYYADSVKGRFTISRDDARNTVYLQMNSLKPEDTAVYYCNVTTFEGRKTEYWGQGTQVTVSS

SEQ ID NO: 12587 - protein, 121 aa, synthetic construct
EVQLVESGGGLVQAGDSLRLSCTASGNIGASIEMGWFRQAPGKEREFVASISTRRLYTYYADSVKGRFTISRDDARNTVYLQMNSLKPEDTAVYYCNVTLLSQGGVINEYWGQGTQVTVSS

SEQ ID NO: 12588 - protein, 120 aa, synthetic construct
EVQLVESGGGLVQAGDSLRLSCTASGALKKPMEMGWFRQAPGKEREFVASISVNGGTYYADSVKGRFTISRDDARNTVYLQMNSLKPEDTAVYYCNVVVVDVMWRFWEYWGQGTQVTVSS

SEQ ID NO: 12589 - protein, 123 aa, synthetic construct
EVQLVESGGGLVQAGDSLRLSCTASGEVEGGIEMGWFRQAPGKEREFVASISLRRNGTYYADSVKGRFTISRDDARNTVYLQMNSLKPEDTAVYYCNVTAVVCGRITNVVEYWGQGTQVTVSS

SEQ ID NO: 12590 - protein, 120 aa, synthetic construct
EVQLVESGGGLVQAGDSLRLSCTASGGGIDLIEMGWFRQAPGKEREFVASISGHTTYTYYADSVKGRFTISRDDARNTVYLQMNSLKPEDTAVYYCNVLVVTHMAVMEYWGQGTQVTVSS

SEQ ID NO: 12591 - protein, 117 aa, synthetic construct
EVQLVESGGGLVQAGDSLRLSCTASGGTEVIWVMGWFRQAPGKEREFVAHVVQTTYYADSVKGRFTLSRADARNTVYLQMNSLKPEDTAVYYCNVVVKGVNYFREYWGQGTQVTVSS

SEQ ID NO: 12592 - protein, 120 aa, synthetic construct
EVQLVESGGGLVQAGDSLRLSCTASGNVESMLSMDWFRQAPGKEREFVASISAHAVYTYYADSVKGRFTISRDDARNTVYLQMNSLKPEDTAVYYCNVITANTFGLFEYWGQGTQVTVSS

SEQ ID NO: 12593 - protein, 120 aa, synthetic construct
EVQLVESGGGLVQAGDSLRLSCTASGRMFGPIEMGWFRQAPGKEREFVASISNARYYTYYADSVKGRFTISRDDARNTVYLQMNSLKPEDTAVYYCNVTCLLMTSVKEYWGQGTQVTVSS

SEQ ID NO: 12594 - protein, 120 aa, synthetic construct
EVQLVESGGGLVQAGDSLRLSCTASGVLDQGLEMGWFRQAPGKEREFVASISMKTGATYYADSVKGRFTVSRDDARNTVYLQMNSLKPEDTAVYYCNVTTLLASGFFEYWGQGTQVTVSS

SEQ ID NO: 12595 - protein, 123 aa, synthetic construct
EVQLVESGGGLVQAGDSLRLSCTASGHLGRVLEMGWFRQAPEKEREFVASISRQGNYTYYADSVKGRFTISRDDARNTVYLQMNSLKPEDTAVYYCNVVRFGEGYSHVFQEYWGQGTQVTVSS

SEQ ID NO: 12596 - protein, 121 aa, synthetic construct
EVQLVESGGGLVQAGDSLRLSCTASGSDDPIVEMGWFRQAPGKEREFVASISGKCAYTYYADSVKGRFTISRDDARNTVYLQMNSLKPEDTAVYYCNVTRVEQRRTINEYWGQGTQVTVSS

SEQ ID NO: 12597 - protein, 124 aa, synthetic construct
EVQLVESGGGLVQAGDSLRLSCTASGPLCKWIEMGWFRQAPGKEREFVASISGHALYTYYADSVKGRFTISRDDARNTVYLQMNSLKPEDTAVYYCNVSKVDTVFEVPAIVEYWGQGTQVTVSS

SEQ ID NO: 12598 - protein, 117 aa, synthetic construct
EVQLVESGGGLVQAGDSLRLSCTASGCMDGVFFMGWFRQAPGKEREFVASISVAHALTYYADSVKGRFTISWDDARNTVYLQMNSLKPEDTAVYYCNVLTIRCHEYWGQGTQVTVSS

SEQ ID NO: 12599 - protein, 120 aa, synthetic construct
EVQLVESGGGLVQAGDSLRLSCTASGGTPEVVEMGWFRQAPGKEREFVASISGMGGYTYYADSVKGRFTISRDDARNTVYLQMNSLKPEDTAVYYCNVTVILGRLIAEYWGQGTQVTVSS

SEQ ID NO: 12600 - protein, 120 aa, synthetic construct
EVQLVESGGGLVQAGDSLRLSCTASDFRFVFRDMGWFRQAPGKEREFVASISDVNAYTYYADSVKGRFTISRDDARNTVYLQMNSLKPEDTAVYYCNAAGVQVTARGEYWGQGTQVTVSS

SEQ ID NO: 12601 - protein, 121 aa, synthetic construct
EVQLVESGGGLVQAGDSLRLSCTASGLALTVIEMGWFRQAPGKEREFVASISGRNVYTYYADSVKGRFTISRDDARNTVYLQMNSLKPEDTAVYYCNVSVLDTTTGLIEYWGQGTQVTVSS

SEQ ID NO: 12602 - protein, 119 aa, synthetic construct
EVQLVESGGGLVQAGDSLRLSCTASGHRIVFREMGWFRQAPGKEREFVASISRTIAYTYYADSVKGRFTISRDDARNTVYLQMNSLKPEDTAVYYCNVLMVMSGFHEYWGQGTQVTVSS

SEQ ID NO: 12603 - protein, 121 aa, synthetic construct
EVQLVESGGGLVQAGDSLRLSCTASGVKGALLEMGWFRQAPGKEREFVASISSRGDYTYYADSVKGRFTISRDDARNTVYLQMNSLKPEDTAVYYCNVVTIHALLSIKEYWGQGTQVTVSS

SEQ ID NO: 12604 - protein, 122 aa, synthetic construct
EVQLVESGGGLVQAGDSLRLSCTASGRDGTTIEMGWFRQAPGKEREFVASISGKVNYTYYADSVKGRFTISRDDARNTVYLQMNSLKPEDTAVYYCNVVYVCHLRVMFIEYWGQGTQVTVSS

SEQ ID NO: 12605 - protein, 119 aa, synthetic construct
EVQLVESGGGLVQAGDSLRLSCTASGVVGILLEMGWFRQAPGKEREFVASISSGTNDTYYADSVKGRFTISRDDARNTVYLQMNSLKPEDTAVYYCNVTALRFMFDEYWGQGTQVTVSS

SEQ ID NO: 12606 - protein, 120 aa, synthetic construct
EVQLVESGGGLVQAGDSLRLSCTASGMDRAPLEMGWFRQAPGKEREFVASISGKQWYTYYADSVKGRFTISRDDARNTVYLQMNSLKPEDTAVYYCNVFGLGGERNTEYWGQGTQVTVSS

SEQ ID NO: 12607 - protein, 120 aa, synthetic construct
EVQLVESGGGLVQAGDSLRLSCTASGVRSRALEMGWFRQAPGKEREFVASISGWVSYTYYADSVKGRFTISRDDARNTVYLQMNSLKPEDTAVYYCNVVWITAVGRIEYWGQGTQVTVSS

SEQ ID NO: 12608 - protein, 122 aa, synthetic construct
EVQLVESGGGLVQAGDSLRLSCTASGRRDILIEMGWFRQAPGKEREFVASISGVRHYTYYADSVKGRFTISRDDARNTVYLQMNSLKPEDTAVYYCNVSVIDVSEGLLKEYWGQGTQVTVSS

SEQ ID NO: 12609 - protein, 119 aa, synthetic construct
EVQLVESGGGLVQAGDSLRLSCTTSGPTRGMVNMGWFRQAPGKEREFVASISARHAHTYYADSVKGRFTISRDDARNTVYLQMNSLKPEDTAVYYCNVIVLHMGWREYWGQGTQVTVSS

SEQ ID NO: 12610 - protein, 121 aa, synthetic construct
EVQLVESGGGLVQAGDSLRLSCTASGVVPGGFEMGWFRQAPGKEREFVASISLYCHYTYYADSVKGRFTISRDDARNTVYLQMNSLKPEDTAVYYCNVVLYVPDSGFEEYWGQGTQVTVSS

SEQ ID NO: 12611 - protein, 120 aa, synthetic construct
EVQLVESGGGLVQAGDSLRLSCTASGVSLIVIEMGWFRQAPGKEREFVASISGRSKYTYYADSVKGRFTISRDDARNTVYLQMNSLKPEDTAVYYCNVLAFMGTYVTEYWGQGTQVTVSS

SEQ ID NO: 12612 - protein, 121 aa, synthetic construct
EVQLVESGGGLVQAGDSLRLSCTASGRALFLLEMGWFRQAPGKEREFVASISCLGTEYTYYADSVKGRFTISRDDARNTVYLQMNSLKPEDTAVYYCNVTSLVRVGLKEYWGQGTQVTVSS

SEQ ID NO: 12613 - protein, 118 aa, synthetic construct
EVQLVESGGGLVQAGDSLRLSCTASGARLVFIDMGWLRQALGKEREFVASISVFVSRSYSADSVKGRFTISRDDARNTVYLQMNSLKPEDTAVYYCNVCVVKNDEEYWGQGTQVTVSS

SEQ ID NO: 12614 - protein, 121 aa, synthetic construct
EVQLVESGGGLVQAGDSLRLSCTASGSSAVVVEMGWFRQAPGKEREFVASISGTGNSTYYADSVKGRFTISRDDARNTVYLQMNSLKPEDTAVYYCNVTAIWNRSRFMKYWGQGTQVTVSS

SEQ ID NO: 12615 - protein, 121 aa, synthetic construct
EVQLVESGGGLVQAGDSLRLSCTASGLPKYLVEMGWFRQAPGKEREFVASISVKGHVTYYADSVKGRFTISRDDARNTVYLQMNSLKPEDTAVYYCNVTAFIVNLGFGEYWGQGTQVTVSS

SEQ ID NO: 12616 - protein, 122 aa, synthetic construct
EVQLVESGGGLVQAGDSLRLSCTASGIGVIYIEMGWFRQAPGKEREFVASISGIGQYTYYADSVKGRFTISRDDARNTVYLQMNSLKPEDTAVYYCNVTSILLPRYTIAEYWGQGTQVTVSS

SEQ ID NO: 12617 - protein, 120 aa, synthetic construct
EVQLVESGGGLVQAGDSLRLSCTASGCATVLEMGWFRQAPGKEREFVASISTRVAYTYYADSVKGRFTISRDDARNTVYLQMNSLKPEDTAVYYCNVVGLLEDWSRKEYWGQGTQVTVSS

SEQ ID NO: 12618 - protein, 122 aa, synthetic construct
EVQLVESGGGLVQAGDSLRLSCTASGYFVITIEMGWFRQAPGKEREFVASISHTGDYTYYADSVKGRFTISRDDARNTVYLQMNSLKPEDTAVYYCNVTGLSGIGMVFAEYWGQGTQVTVSS

SEQ ID NO: 12619 - protein, 117 aa, synthetic construct
EVQLVESGGGLVQAGDSLRLSCTASGRCSVVVIMGWFRQAPGKEREFVASISGGAWVTYYADSVKGRFTISRDDARNTVYLQMNSLKPEDTAVYYCNVVTDRIIEYWGQGTQVTVSS

SEQ ID NO: 12620 - protein, 119 aa, synthetic construct
EVQLVESGGGLVQAGDSLRLSCTASGVRLVFCEMGWFRQAPGKEREFVASISGFGLRTYYTDSVKGRFTISRDDARNTVYLQMNSLKPEDTAVYYCNVLANGMNVIEYWGQGTQVTVSS

SEQ ID NO: 12621 - protein, 120 aa, synthetic construct
EVQLVESGGGLVQAGDSLRLSCTASGHLSGAIEMGWFRQAPGKEREFVASISVGQRGTYYADSVKGRFTISRDDARNTVYLQMNSLKPEDTAVYYCNVTVFSIAGFTEYWGQGTQVTVSS

SEQ ID NO: 12622 - protein, 119 aa, synthetic construct
EVQLVESGGGLVQAGDSLRLSCTASGSWARLRDMGWFRQAPGKEREFVASIHLPVWTYYADSVKGRFTISRDDARNTVYLQMNSLKPEDTAVYYCNVTVYCNDMIMEYWGQGTQVTVSS

SEQ ID NO: 12623 - protein, 120 aa, synthetic construct
EVQLVESGGGLVQAGDSLRLSCTASGIQVTVMEMGWFRQAPGKEREFVASISRTRTYTYYADSVKGRFTISRDDARNTVYLQMNSLKPEDTAVYYCNVVVFAAGIFNEYWGQGTQVTVSS

SEQ ID NO: 12624 - protein, 122 aa, synthetic construct
EVQLVESGGGLVQAGDSLRLSCTASGISGHVMYMGWFRQAPGKEREFVASISGTRPYTYYADSVKGRFTISRDDARNTVYLQMNSLKPEDTAVYYCNVLSWDVANGLIVEYWGQGTQVTVSS

SEQ ID NO: 12625 - protein, 121 aa, synthetic construct
EVQLVESGGGLVQAGDSLRLSCTASGGSWGLIEMGWFRQAPGKEREFVASISRSKAYTYYADSVKGRFTISRDDARNTVYLQMNSLKPEDTAVYYCNVLKVTAVGRFNEYWGQGTQVTVSS

SEQ ID NO: 12626 - protein, 120 aa, synthetic construct
EVQLVESGGGLVQAGDSLRLSCTASGMSPGLMEMGWFRQAPGKEREFVASISMTQAYTYYADSVKGRFTISRDDARNTVYLQMNSLKPEDTAVYYCNVTVVRGYVLAEYWGQGTQVTVSS

SEQ ID NO: 12627 - protein, 120 aa, synthetic construct
EVQLVESGGGLVQAGDSLRLSCTASGELMRIIEMGWFRQAPGKEREFVASISGHSLFTYYADSVKGRFTISRDDARNTVYLQMNSLKPEDTAVYYCNVTKVACLKFEEYWGQGTQVTVSS

SEQ ID NO: 12628 - protein, 121 aa, synthetic construct
EVQLVESGGGLVQAGDSLRLSCTASGRSNGLVEMGWFRQAPGKEREFVASISSVVTYTYYADSVKGRFTISRDDARNTVYLQMNSLKPEDTAVYYCNVVGFSVKGFFTEYWGQGTQVTVSS

SEQ ID NO: 12629 - protein, 120 aa, synthetic construct
EVQLVESGGGLVQAGDSLRLSCTASGTNVLVIEMGWFRQAPGKEREFVASISIMRGYTYYADSVKGRFTISRDDARNTVYLQMNSLKPEDTAVYYCNVTGFVLGAFVEYWGQGTQVTVSS

SEQ ID NO: 12630 - protein, 120 aa, synthetic construct
EVQLVESGGGLVQAGDSLRLSCTASGHLNAVLEMGWFRQAPGKEREFVASISGRAYWTYYTDSVKGCFTISRDDARNTVYLQMNSLKPEDTAVYYCNVTIRDRGRFIEYWGQGTQVTVSS

SEQ ID NO: 12631 - protein, 119 aa, synthetic construct
EVQLVESGGGLVQAGDSLRLSCTASGNIVTVIEMGWFRQAPGKEREFVASISWKDSGTYYADSVKGRFTISRDDARNTVYLQMNSLKPEDTAVYYCNVTRLVYKFVEYWGQGTQVTVSS

SEQ ID NO: 12632 - protein, 121 aa, synthetic construct
EVQLVESGGGLVQAGDSLRLSCTASGDIDKVLEMGWFRQAPGKEREFVASISGAGGYTYYADSVKGRFTISRDDARNTVYLQMNSLKPEDTAVYYCNVLVIIGLMFIAEYWGQGTQVTVSS

SEQ ID NO: 12633 - protein, 115 aa, synthetic construct
EVQLVESGGGLVQAGDSLRLSCTASGLEMGWFRQAPGKEREFVASISAALHYTYYADSVKGRFTISRDDARNTVYLQMNSLKPEDTAVYYCNVTSYGGDGFVEYWGQGTQVTVSS

SEQ ID NO: 12634 - protein, 117 aa, synthetic construct
EVQLVESGGGLVQAGDSLRLSCTASGISAVVRWMGWFRQAPGKEREFVAVIIDVGDTYYADSVKGRFTISRDDARNTVYLQMNSLKPEDTAVYYCNVLGKGVGGEYWGQGTQVTVSS

SEQ ID NO: 12635 - protein, 119 aa, synthetic construct
EVQLVESGGGLVQAGDSLRLSCTASGSVAYAIEMGWFRQAPGKEREFVASISMRYDYTYYADSVKGRFTISRDDARNTVYLQMNSLKPEDTAVYYCNVTGLQDRLVEYWGQGTQVTVSS

SEQ ID NO: 12636 - protein, 120 aa, synthetic construct
EVQLVESGGGLVQAGDSLRLSCTASGVLECVLEMGWFRQAPGKEREFVASISGRASATYYADSVKGRFTISRDDARNTVYLQMNSLKPEDTAVYYCNATDLAVRGFVEYWGQGTQVTVSS

SEQ ID NO: 12637 - protein, 120 aa, synthetic construct
EVQLVESGGGLVQAGDSLRLSCTASGTDRVALEMGWFRQAPGKEREFVASISGMTTYTYYADSVKGRFTISRDDARNTVYLQMNSLKPEDTAVYYCNVLIVGDNRPKEYWGQGTQVTVSS

SEQ ID NO: 12638 - protein, 124 aa, synthetic construct
EVQLVESGGGLVQAGDSLRLSCTASGNVRRHVEMGWFRQAPGKEREFVASISGSDLNTYYADSVKGRFTISRDDARNTVYLQMNSLKPEDTAVYYCNVTVLECHDGKIMFVEYWGQGTQVTVSS

SEQ ID NO: 12639 - protein, 119 aa, synthetic construct
EVQLVESGGGLVQAGDSLRLSCTTSGPWVNAIEMGWFRQAPGKEREFVASISGTIGMTYYADSVKGRFTISRDDARNTVYLQMNSLKPEDTAVYYCNVTIWRRLFFEYWGQGTQVTVSS

SEQ ID NO: 12640 - protein, 120 aa, synthetic construct
EVQLVESGGGLVQAGDSLRLSCTASGLRDWVIEMGWFRQAPGKEREFVASISMRRIYTYYADSVKGRFTISRDDARNTVYLQMNSLKPEDTAVYYCNVMGLSPVKVFEYWGQGTQVTVSS

SEQ ID NO: 12641 - protein, 120 aa, synthetic construct
EVQLVESGGGLVQAGDSLRLSCTASGIGDPIVEMGWFRQAPGKEREFVASISGISRYTYYADSVKGRFTISRDDARNTVYLQMNSLKPEDTAVYYCNVMTFSMGAKNEYWGQGTQVTVSS

SEQ ID NO: 12642 - protein, 120 aa, synthetic construct
EVQLVESGGGLVQAGDSLRLSCTASGGMVCALEMGWFRQAPGKEREFVASISDGGHYTYYADSVKGRFTISRDDARNTVYLQMNSLKPEDTAVYYCNVVVVRNGTFREYWGQGTQVTVSS

SEQ ID NO: 12643 - protein, 121 aa, synthetic construct
EVQLVESGGGLVQAGDSLRLSCTASGRIRMMIEMGWFRQAPGKEREFVASISGANRYTYYADSVKGRFTISRDDARNTVYLQMNSLKPEDTAVYYCNVWQLSSTMQFLEYWGQGTQVTVSS

SEQ ID NO: 12644 - protein, 122 aa, synthetic construct
EVQLVESGGGLVQAGDSLRLSCTASGPIVSPLEMGWFRQAPGKEREFVASISNTASYTYYADSVKGRFTISRDDARNTVYLQMNSLKPEDTAVYYCNVTSLVWASMRITEYWGQGTQVTVSS

SEQ ID NO: 12645 - protein, 120 aa, synthetic construct
EVQLVESGGGLVQAGDSLRLSCTASGRHDLRFWMGWFRQAPGKEREFVASISGSRTMTYYADSVKGRFTISRDDARNTVYLQMNSLKPEDTAVYYCNVESINVYVGYEYWGQGTQVTVSS

SEQ ID NO: 12646 - protein, 124 aa, synthetic construct
EVQLVESGGGLVQAGDSLRLSCTASGLPGLKMEMGWFRQAPGKEREFVASISMRDAITYYADSVKGRFTISRDDARNTVYLQMNSLKPEDTAVYYCNVAVLIALRNYFGFDEYWGQGTQVTVSS

SEQ ID NO: 12647 - protein, 111 aa, synthetic construct
EVQLVESGGGLVQAGDSLRLSCTASGRDMRYLMMGWFRQAPGKEREFVAVICAMAETYYADSVKGRFTISRDDARNTVYLQMNSLKPEDTAVYYCNVSEYWGQGTQVTVSS

SEQ ID NO: 12648 - protein, 115 aa, synthetic construct
EVQLVESGGGLVQAGDSLRLSCTASGIEMGWFRQAPGKEREFVASISRSGHYTYYADSVKGRFTISRDDARNTVYLQMNSLKPEDTAVYYCNVVTVMVRGFLEYWGQGTQVTVSS

SEQ ID NO: 12649 - protein, 120 aa, synthetic construct
EVQLVESGGGLVQAGDSLRLSCTASGLSENALEMGWFRQAPGKEREFVASISVQRIYTYYADSVKGRFTISRDDARNTVYLQMNSLKPEDTAVYYCNVTVWHKMVMGEYWGQGTQVTVSS

SEQ ID NO: 12650 - protein, 120 aa, synthetic construct
EVQLVESGGGLVQAGDSLRLSCTASGPHRILARMGWFRQAPGKEREFVASISEKARRTYYADSVKGRFTISRDDARNTVYLQMNSLKPEDTAVYYCNVVDFSSYAFGEYWGQGTQVTVSS

SEQ ID NO: 12651 - protein, 120 aa, synthetic construct
EVQLVESGGGLVQAGDSLRLSCTASGRIGYALLMDWFRQAPGKEREFVASISGGSRTTYYADSVKGRFTISRDDARNTVYLQMNSLKPEDTAVYYCNVDVLDERGLIEYWGQGTQVTVSS

SEQ ID NO: 12652 - protein, 120 aa, synthetic construct
EVQLVESGGGLVQAGDSLRLSCTASGRPREVLEMGWFRQAPGKEREFVASISGTGRYTYYADSVKGRFTISRDDARNTVYLQMNSLKPEDTAVYYCNVVYMVLKVFMEYWGQGTQVTVSS

SEQ ID NO: 12653 - protein, 125 aa, synthetic construct
EVQLVESGGGLVQAGDSLRLSCTASGLGRNLMEMGWFRQAPGKEREFVASISGIDNLTYYADSVKGRFTISRDDARNTVYLQMNSLKPEDTAVYYCNVTILRTEVGAAVIFKEYWGQGTQVTVSS

SEQ ID NO: 12654 - protein, 120 aa, synthetic construct
EVQLVESGGGLVQAGDSLRLSCTASGLSGKVIEMGWFRQAPGKEREFVASISVSALYTYYADSVKGRFTISRDDARNTVYLQMNSLKPEDTAVYYCNVWNITARKFGEYWGQGTQVTVSS

SEQ ID NO: 12655 - protein, 117 aa, synthetic construct
EVQLVESGGGLVQAGDSLRLSCTASGVRATPLEMGWFRQAPGKEREFVASISRNDRYTYYADSVKGRFTISRDDARNTVYLQMNSLKPEDTAVYYCNVVVEVWAEYWGQGTQVTVSS

SEQ ID NO: 12656 - protein, 121 aa, synthetic construct
EVQLVESGGGLVQAGDSLRLSCTASGEKGYILEMGWFRQAPGKQREFVASISAAVARTYYADSVKGRFTISRDDARNTVYLQMNSLKPEDTAVYYCNVTKVVRGGRFSEYWGQGTQVTVSS

SEQ ID NO: 12657 - protein, 124 aa, synthetic construct
EVQLVESGGGLVQAGDSLRLSCTASGRNGWWVEMGWFRQAPGMEREFVASISGNSFATYYADSVKGRFTISRDDARNTVYLQMNSLKPEDTAVYYCNVTALCNNGLTRAFQEYWGQGTQVTVSS

SEQ ID NO: 12658 - protein, 125 aa, synthetic construct
EVQLVESGGGLVQAGDSLRLSCTASGVLQDVLEMGWFRQAPGKEREFVASISGNNGFTYYADSVKGRFTISRDDARNTVYLQMNSLKPEDTAVYYCNVTDVSRGRVGGTIFIEYWGQGTQVTVSS

SEQ ID NO: 12659 - protein, 123 aa, synthetic construct
EVQLVESGGGLVQAGDSLRLSCTASGRIGRIVEMGWFRQAPGKEREFVASISGGMRYTYYADSVKGRFTISRDDARNTVYLQMNSLKPEDTAVYYCNVTSVQGRSLRGFDEYWGQGTQVTVSS

SEQ ID NO: 12660 - protein, 118 aa, synthetic construct
EVQLVESGGGLVQAGDSLRLSCTASGGRIVFTVMGWFRQAPGKERVFVASISGVGSVTYYADSIKGRFTISRDDARNTVYLQMNSLKPEDTAVYYCNVGLDQGAMEYWGQGTQVTVSS

SEQ ID NO: 12661 - protein, 120 aa, synthetic construct
EVQLVESGGGLVQAGDSLRLSCTASGCVRSWVEMGWFRQAPGKEREFVASISRRLDYTYYADSVKGRFTISRDDARNTVYLQMNSLKPEDTAVYYCNVTRVGSGSFDEYWGQGTQVTVSS

SEQ ID NO: 12662 - protein, 123 aa, synthetic construct
EVQLVESGGGLVQAGDSLRLSCTASGVMHIVLEMGWFRQAPGKEREFVASISGAMGGTYYADSVKGRFTISRDDARNTVYLQMNSLKPEDTAVYYCNWTICNQSLERHFIEYWGQGTQVTVSS

SEQ ID NO: 12663 - protein, 121 aa, synthetic construct
EVQLVESGGGLVQAGDSLRLSCTASGHQQAPIEMGWFRQAPGKEREFVASISGVGLYTYYADSVKGRFTISRDDARNTVYLQMNSLKPEDTAVYYCNVSIIDVTVFLREYWGQGTQVTVSS

SEQ ID NO: 12664 - protein, 119 aa, synthetic construct
EVQLVESGGGLVQAGDSLRLSCTASGLLRLAGAMGWFRQAPGKEREFVASISIYGNTTYYADSVKGRFTISRDDARNTVYLQMNSLKPEDTAVYYCNVIHVQNGWVEYWGQGTQVTVSS

SEQ ID NO: 12665 - protein, 120 aa, synthetic construct
EVQLVESGGGLVQAGDSLRLSCTASGIGLLLLEMGWFRQAPGKEREFVASISGHSAYTYYADSAKGRFTISRDDARNTVYLQMNSLKPEDTAVYYCNVVVMRQRTFREYWGQGTQVTVSS

SEQ ID NO: 12666 - protein, 120 aa, synthetic construct
EVQLVESGGGLVQAGDSLRLSCTASGELRTAVEMGWFRQAPGKEREFVASIAVWKVYTYYADSVKGRFTISRDDARNTVYLQMNSLKPEDAAVYYCNVSVVRPTGVTEYWGQGTQVTVSS

SEQ ID NO: 12667 - protein, 121 aa, synthetic construct
EVQLVESGGGLVQAGDSLRLSCTASGVRADQMEMGWFRQAPGKEREFVASISMRGYYTYYADSVKGRFTISRDDARNTVYLQMNSLKPEDTAVYYCNVVTYTLQTGFIEYWGQGTQVTVSS

SEQ ID NO: 12668 - protein, 120 aa, synthetic construct
EVQLVESGGGLVQAGDSLRLSCTASGNMMRVIEMGWFRQAPGKEREFVASISGGMDYTYYADSVKGRFTISRDDARNTVYLQMNSLKPEDTAVYYCNVTDFAAHLLWEYWGQGTQVTVSS

SEQ ID NO: 12669 - protein, 119 aa, synthetic construct
EVQLVESGGGLVQAGDSLRLSCTASGSSHSMIGMGWFRQAPGKEREFVASISVRHRVTYYADSVKGRFTISRDDARNTVYLQMNSLKPEDTAVYYCNVTVFDLVFIEYWGQGTQVTVSS

SEQ ID NO: 12670 - protein, 121 aa, synthetic construct
EVQLVESGGGLVQAGDSLRLSCTASGIFTPMIEMGWFRQAPGKEREFVASISVRGILTYYADSVKGRFTISRGDARNTVYLQMNSLKPEDTAVYYCNVTVWLGAYGFGEYWGQGTQVTVSS

SEQ ID NO: 12671 - protein, 123 aa, synthetic construct
EVQLVESGGGLVQAGDSLRLSCTASGNVSVVIEMGWFRQAPGKEREFVASISGTGNRTYYADSVKGRFTISRDDARNTVYLQMNSLKPEDTAVYYCNVTSMCLGAVTAFVEYWGQGTQVTVSS

SEQ ID NO: 12672 - protein, 121 aa, synthetic construct
EVQLVESGGGLVQAGDSLRLSCTASGKMRSRVEMGWFRQAPGKEREFVASISGVGSYTYYADSVKGRFTISRDDARNTVYLQMNSLKPEDTAVYYCNVLGFSFEGYLGEYWGQGTQVTVSS

SEQ ID NO: 12673 - protein, 124 aa, synthetic construct
EVQLVESGGGLVQAGDSLRLSCTASGNCNVVVEMGWFRQAPGKEREFVASISGRRDYTYYADSVKGRFTISRDDARNTVYLQMNSLKPEDTAVYYCNVTSLDGKRVQVGFIEYWGQGTQVTVSS

SEQ ID NO: 12674 - protein, 119 aa, synthetic construct
EVQLVESGGGLVQAGDSLRLSCTASGQKMEYVEMGWFRQAPGKEREFVASISESRNYTYYADSVKGRFTISRDDARNTVYLQMNSLKPEDTAVYYCNVTAFKDSFVEYWGQGTQVTVSS

SEQ ID NO: 12675 - protein, 120 aa, synthetic construct
EVQLVESGGGLVQAGDSLRLSCTASGLKESALEMGWFRQAPGKEREFVASISGVRGYTYYADSVKGRFTISRDDARNTVYLQMNSLKPEDTAVYYCNVTGRLMNGFVEYWGQGTQVTVSS

SEQ ID NO: 12676 - protein, 119 aa, synthetic construct
EVQLVESGGGLVQAGDSLRLSCTASGLCSVVVEMGWFRQAPGKEREFVASISGNTDYTYYADSVKGRFTISRDDARNTVYLQMNSLKPEDTAVYYCNVTLMLNGRKEYWGQGTQVTVSS

SEQ ID NO: 12677 - protein, 118 aa, synthetic construct
EVQLVESGGGLVQAGDSLRLSCTASGFMFVFVDMGWFRQAPGKEREFVASISGFGANTYYADSVKGRFTISRDDARNTVYLQMNSLKPEDTAVYYCNVMHQDGRDEYWGQGTQVTVSS

SEQ ID NO: 12678 - protein, 120 aa, synthetic construct
EVQLVESGGGLVQAGDSLRLSCTASGIRGFYLEMGWFRQAPGKEREFVASISLQAWWTYYADSVKGRFTISRDDARNTVYLQMNSLKPEDTAVYYCNVTAVSDRGFREYWGQGTQVTVSS

SEQ ID NO: 12679 - protein, 124 aa, synthetic construct
EVQLVESGGGLVQAGDSLRLSCTASGKNEGGLEMGWFRQAPGKEREFVASISTSVNYTYYADSVKGRFTISRDDARNTVYLQMNSLKPEDTAVYYCNVTKVVHTALGILFREYWGQGTQVTVSS

SEQ ID NO: 12680 - protein, 120 aa, synthetic construct
EVQLVESGGGLVQAGDSLRLSCTASGTQIVLIEMGWFRQAPGKEREFVASISTKGHSTYYADSVKGRFTISRDDARNTVYLQMNSLKPEDTAVYYCNVTGLSLLGFVEYWGQGTQVTVSS

SEQ ID NO: 12681 - protein, 120 aa, synthetic construct
EVQLVESGGGLVQAGDSLRLSCTASGRMRDLLEMGWFRQAPGKEREFVASISGDHLYTYYADSVKGRFTISRDDARNTVYLQMNSLKPEDTAVYYCNVSVFKMGVLVEYWGQGTQVTVSS

SEQ ID NO: 12682 - protein, 117 aa, synthetic construct
EVQLVESGGGLVQAGDSLRLSCTASGPVTDFIEMGWFRQAPGKEREFVASISRSAVYTYYADSVKGRFTISRDDARNTVYLQMNSLKPEDTAVYYCNVFHYGFVEYWGQGTQVTVSS

SEQ ID NO: 12683 - protein, 119 aa, synthetic construct
EVQLVESGGGLVQAGDSLRLSCTASGDLHDYIEMGWFRQAPGKEREFVASISVRQAYTYYADSVKGRFTISRDDARNTVYLQMNSLKPEDTAVYYCNVTGMTMVKCEYWGQGTQVTVSS

SEQ ID NO: 12684 - protein, 121 aa, synthetic construct
EVQLVESGGGLVQAGDSLRLSCTASGMTGVGIEMGWFRQAPGKEREFVASISVKCDGTYYADSVKGRFTISRDDARNTVYLQMNSLKPEDTAVYYCNVTVLEAHVMFEEYWGQGTQVTVSS

SEQ ID NO: 12685 - protein, 119 aa, synthetic construct
EVQLVESGGGLVQAGDSLRLSCTASGVRDIALEMGWFRQAPGKEREFVASISMTVLYTYYADSVKGRFTISRDDARNTVYLQMNSLKPEDTAVYYCNVVVMTHRFREYWGQGTQVTVSS

SEQ ID NO: 12686 - protein, 119 aa, synthetic construct
EVQLVESGGGLVQAGDSLRLSCTASGHVNSVLEMGWFRQAPGKEREFVASISACYDYTYYADSVKGRFTISRDDARNTVYLQMNSLKPEDTAVYYCNVTAFTADVYEYWGQGTQVTVSS

SEQ ID NO: 12687 - protein, 117 aa, synthetic construct
EVQLVESGGGLVQAGDSLRLSCTASGGVLTIMIMGWFRQAPGKEREFVASTSGDPDVTYYADSVKGRFTISRDDARNTVYLQMNSLKPEDTAVYYCNVVDSRIREYWGQGTQVTVSS

SEQ ID NO: 12688 - protein, 121 aa, synthetic construct
EVQLVESGGGLVQAGDSLRLSCTASGEVAFTIEMGWFRQAPGKEREFVASISGRGDYTYYADSVKGRFTISRDDARNTVYLQMNSLKPEDTAVYYCNVLGIGVFGSLNEYWGQGTQVTVSS

SEQ ID NO: 12689 - protein, 121 aa, synthetic construct
EVQLVESGGGLVQAGDSLRLSCTASGVDGHIMEMGWFRQAPGKEREFVASISGDYVYTYYADSVKGRFTISRDDARNTVYLQMNSLKPEDTAVYYCNVVTRTWPGGFEEYWGQGTQVTVSS

SEQ ID NO: 12690 - protein, 120 aa, synthetic construct
EVQLVESGGGLVQAGDSLRLSCTASGRIVVIVEMGWFRQAPGKEREFVASISHRDRSTYYADSVKGRFTISRDDARNTVYLQMNSLKPEDTAVYYCNVTYFVFPTFMEYWGQGTQVTVSS

SEQ ID NO: 12691 - protein, 125 aa, synthetic construct
EVQLVESGGGLVQAGDSLRLSCTASGIGPVVMEMGWFRQAPGKEREFVASISCSTVYTYYADSVKGRFTISRDDARNTVYLQMNSLKPEDTAVYYCNVRGVNVPGTMFMHFFEYWGQGTQVTVSS

SEQ ID NO: 12692 - protein, 118 aa, synthetic construct
EVQLVESGGGLVQAGDSLRLSCTASGPVVTNGRMGWFRQAPGKEREFVASISVAHGRTYYADSVKGRFTISRDDARNTVYLQMNSLKPEDTAVYYCNVLALPEWVEYWGQGTQVTVSS

SEQ ID NO: 12693 - protein, 124 aa, synthetic construct
EVQLVESGGGLVQAGDSLRLSCTASGDLRTGVEMGWFRQAPGKEREFVASISKTVTYTYYADSVKGRFTISRDDARNTVYLQMNSLKPEDTAVYYCNVTCIHFMADRVNVMEYWGQGTQVTVSS

SEQ ID NO: 12694 - protein, 120 aa, synthetic construct
EVQLVESGGGLVQAGDSLRLSCTASGVRWIVLEMGWFRQAPGKEREFVASISDQELYTYYADSVKGRFTISRDDARNTVYLQMNSLKPEDTAVYYCNVVTVAPLGFVEYWGQGTQVTVSS

SEQ ID NO: 12695 - protein, 119 aa, synthetic construct
EVQLVESGGGLVQAGDSLRLSCTASGISGYALEMGWFRQAPGKEREFVASISVRDCWTYYADSVKGRFTISRDDARNTVYLQMNSLKPEDTAVYYCNVLCMDVYKVEYWGQGTQVTVSS

SEQ ID NO: 12696 - protein, 122 aa, synthetic construct
EVQLVESGGGLVQAGDSLRLSCTASGLGSTVLEMGWFRQAPGKEREFVASISGTNQGTYYADSVKGRFTISRDDARNTVYLQMNSLKPEDTAVYYCNVTLWLGCLKGFSEYWGQGTQVTVSS

SEQ ID NO: 12697 - protein, 117 aa, synthetic construct
EVQLVESGGGLVQAGDSLRLSCTASGTLDAILEMGWFRQAPGKEREFVASISGTGTFTYYADSVKGRFTISRDDARNTVYLQMNSLKPEDTAVYYCNVTDLFFDEYWGQGTQVTVSS

SEQ ID NO: 12698 - protein, 120 aa, synthetic construct
EVQLVESGGGLVQAGDSLRLSCTASGALHMSVEMGWFRQAPGKEREFVASISGVSVYTYYADSVKGRFTISRDDARNTVYLQMNSLKPEDTAVYYCNVTFVTRQGIIEYWGQGTQVTVSS

SEQ ID NO: 12699 - protein, 119 aa, synthetic construct
EVQLVESGGGLVQAGDSLRLSCTASGCIGQVLEMGWFRQAPGKEREFVASISGRGLITYYADSVKGRFTISRDDARNTVYLQMNSLKPEDTAVYYCNVTALNGTFKEYWGQGTQVTVSS

SEQ ID NO: 12700 - protein, 120 aa, synthetic construct
EVQLVESGGGLVQAGDSLRLSCTASGLGPDILEMGWFRQAPGKEREFVASISVAGGYTYYADSVKGRFTISRDDARNTVYLQMNSLKPEDTAVYYCNVVFVHRWRFVEYWGQGTQVTVSS

SEQ ID NO: 12701 - protein, 120 aa, synthetic construct
EVQLVESGGGLVQAGDSLRLSCTASGVRVVFMDMGWFRQAPGKEREFVASISGFCGTTYYADSVKGRFTISRDDARNTVYLQMNSLKPEDTAVYYCNVLGHNTCNGGEYWGQGTQVTVSS

SEQ ID NO: 12702 - protein, 125 aa, synthetic construct
EVQLVESGGGLVQAGDSLRLSCTASGHIRTRVEMGWFRQAPGKEREFVASISGENPYTYYADSVKGRFTISRDDARNTVYLQMNSLKPEDTAVYYCNVTGVIVDIMGSCSFREYWGQGTQVTVSS

SEQ ID NO: 12703 - protein, 119 aa, synthetic construct
EVQLVESGGGLVQAGDSLRLSCTASGQLYTTIEMGWFRQAPGKEREFVASISYGDGGTYYADSVKGRFTISRDDARNTVYLQMNSLKPEDTAVYYCNVTAFVRIKMEYWGQGTQVTVSS

SEQ ID NO: 12704 - protein, 120 aa, synthetic construct
EVQLVESGGGLVQAGDSLRLSCTASGSVASTLEMGWFRQAPGKEREFVASISGFRTYTYYADSVKGRFTISRDDARNTVYLQMNSLKPEDTAVYYCNVMQYGSFGFFEYWGQGTQVTVSS

SEQ ID NO: 12705 - protein, 119 aa, synthetic construct
EVQLVESGGGLVQAGDSLRLSCTASGTLHYMIEMGWFRQAPGKEREFVASISCQAWNTYYADSVKGRFTISRDDARNTVYLQMNSLKPEDTAVYYCNVTIFVMGFVEYWGQGTQVTVSS

SEQ ID NO: 12706 - protein, 120 aa, synthetic construct
EVQLVESGGGLVQAGDSLRLSCTASGGPVGVVEMGWFRQAPGKEREFVASISKRADYTYYADSVKGRFTISRDDARNTVYLQMNSLKPEDTAVYYCNVTIVARGRIVEYWGQGTQVTVSS

SEQ ID NO: 12707 - protein, 119 aa, synthetic construct
EVQLVESGGGLVQAGDSLRLSCTASGGHDGICFMGWFRQAPGKEREFVASISTLGERTYYADSVKGRFTISRDDARNTVYLQMNSLKPEDTAVYYCNVLGFFAHTAEYWGQGTQVTVSS

SEQ ID NO: 12708 - protein, 120 aa, synthetic construct
EVQLVESGGGLVQAGDSLRLSCTASGKKSPLIEMGWFRQAPGKEREFVASISMRGIETYYADSVKGRFTISRDDARNTVYLQMNSLKPEDTAVYYCNVTTVVARGFMEYWGQGTQVTVSS

SEQ ID NO: 12709 - protein, 119 aa, synthetic construct
EVQLVESGGGLVQAGDSLRLSCTASGDGGDRLEMGWFRQAPGKEREFVASISCRCVRTYYADSVKGRFTISRDDARNTVYLQMNSLKPEDTAVYYCNVTCIKMVFREYWGQGTQVTVSS

SEQ ID NO: 12710 - protein, 120 aa, synthetic construct
EVQLVESGGGLVQAGDSLRLSCTASGRDVDLIEMGWFRQAPGKEREFVASISVMRVYTYYADSVKGRFTISRDDARNTVYLQMNSLKPEDTAVYYCNAVMLKGGCFWEYWGQGTQVTVSS

SEQ ID NO: 12711 - protein, 120 aa, synthetic construct
EVQLVESGGGLVQAGDSLRLSCTASGLQGLALEMGWFRQAPGKEREFVASISGLDRGTYYADSVKGRFTISRDDARNTVYLQMNSLKPEDTAVYYCNVVSHYLGMFEEYWGQGTQVTVSS

SEQ ID NO: 12712 - protein, 120 aa, synthetic construct
EVQLVESGGGLVQAGDSLRLSCTASGNMDCVVEMGWFRQAPGKEREFVASISSNGSYTYYADSVKGRFTISRDDARNTVYLQMNSLKPEDTAVYYCNVVTICGLGIVEYWGQGTQVTVSS

SEQ ID NO: 12713 - protein, 121 aa, synthetic construct
EVQLVESGGGLVQAGDSLRLSCTASGLAFGSVEMGWFRQAPGKEREFVASISMWADYTYYADSVKGRFTISRDDARNTVYLQMNSLKPEDTAVYYCNVTAMEIGGKFVEYWGQGTQVTVSS

SEQ ID NO: 12714 - protein, 121 aa, synthetic construct
EVQLVESGGGLVQAGDSLRLSCTASGVIDELIEMGWFRQAPGKEREFVASISGRSIYTYYADSVKGRFTISRDDARNTVYLQMNSLKPEDTAVYYCNVVWMNIVGLFGEYWGQGTQVTVSS

SEQ ID NO: 12715 - protein, 121 aa, synthetic construct
EVQLVESGGGLVQAGDSLRLSCTASGVMAQVVEMGWFRQAPGKEREFVASISGTLHYTYYADSVKGRFTISRDDARNTVYLQMNSLKPEDTAVYYCNVSVHVDLGGFHEYWGQGTQVTVSS

SEQ ID NO: 12716 - protein, 120 aa, synthetic construct
EVQLVESGGGLVQAGDSLRLSCTASGLMIPVLEMGWFRQAPGKEREFVASISYTAVYTYYADSVKGRFTISRDDARNTVYLQMNSLKPEDTAVYYCNVIAIRNGKFVEYWGQGTQVTVSS

SEQ ID NO: 12717 - protein, 119 aa, synthetic construct
EVQLVESGGGLVQAGDSLRLSCTASGLLQGLIEMGWFRQAPGKEREFVASISGVGIYTYYADSVKGRFTISRDDARNTVYLQMNSLKPEDTAVYYCNVAVLGVRLLEYWGQGTQVTVSS

SEQ ID NO: 12718 - protein, 118 aa, synthetic construct
EVQLVESGGGLVQAGDSLRLSCTASQTQDCVEMGWFRQAPGKEREFVASISYRQHSTYYADSVKGRFTISRDDARNTVYLQMNSLKPEDTAVYYCNVTCIRHCVYEYWGQGTQVTVSS

SEQ ID NO: 12719 - protein, 119 aa, synthetic construct
EVQLVESGGGLVQAGDSLRLSCTASGYANARIEMGWFRQAPGKEREFVASISEVSRDTYYADSVKGRFTISRDDARNTVYLQMNSLKPEDTAVYYCRQTVVWATFFEYWGQGTQVTVSS

SEQ ID NO: 12720 - protein, 122 aa, synthetic construct
EVQLVESGGGLVQAGDSLRLSCTASGNLRDGIEMGWFRQAPGKEREFVASISVLTMATYYADSVKGRFTISRDDARNTVYLQMNSLKPEDTAVYYCNVTSIVITMKRFVEYWGQGTQVTVSS

SEQ ID NO: 12721 - protein, 118 aa, synthetic construct
EVQLVESGGGLVQAGDSLRLSCTASGSYVGSDWMGWFRQAPGKEREFVASIWGVFTYYADSVKGRFTISRDDARNTVYLQMNSLKPEDTAVYYCNVVKPSDSIVTEYWGQGTQVTVSS

SEQ ID NO: 12722 - protein, 124 aa, synthetic construct
EVQLVESGGGLVQAGDSLRLSCTASGVVAVVMEMGWFRQAPGKEREFVASISGVGGKTYYADSVKGRFTISRDDARNTVYLQMNSLKPEDTAVYYCNVTVLSISNHGVDKIEYWGQGTQVTVSS

SEQ ID NO: 12723 - protein, 120 aa, synthetic construct
EVQLVESGGGLVQAGDSLRLSCTASGVYRRIWRMGWFRQAPGKEREFVASISGMGPATYYADSVKGRFTISRDDARNTVYLQMNSLKPEDTAVYYCNVVEIGYSDDFEYWGQGTQVTVSS

SEQ ID NO: 12724 - protein, 120 aa, synthetic construct
EVQLVESGGGLVQAGDSLRLSCTASGMVKRVLEMCWFRQAPGKEREFVASISGRDFVTYYADSVKGRFTISRDDARNTVYLQMNSLKPEDTAVYYCNVTVIGRDYFLEYWGQGTQVTVSS

SEQ ID NO: 12725 - protein, 119 aa, synthetic construct
EVQLVESGGGLVQAGDSLRLSCTASGRRDYLLEMGWFRQAPGKEREFVASISKHTDYTYYADSVKGRFTISRDDARNTVYLQMNSLKPEDTAVYYCNVVVVDRSFTEYWGQGTQVTVSS

SEQ ID NO: 12726 - protein, 117 aa, synthetic construct
EVQLVESGGGLVQAGDSLRLSCTASGGCTRVIDLGWVRQAPCKGREFVARISGFHQDKYYADSVKGRFTISRDDARNTVYLQMNSLKPEDTAVYYCNVGNDVHHEYWGQGTQVTVSS

SEQ ID NO: 12727 - protein, 121 aa, synthetic construct
EVQLVESGGGLVQAGDSLRLSCTASGTILVNMEMGWFRQAPGKEREFVASISCTSDYTYYADSVKGRFTISRDDARNTVYLQMNSLKPEDTAVYYCNVTVLGYGGFIVEYWGQGTQVTVSS

SEQ ID NO: 12728 - protein, 119 aa, synthetic construct
EVQLVESGGGLVQAGDSLRLSCTASGLVVRRFVMGWFRQAPGKEREFVASISKEVCSTYYADSVKGRFTISRDDARNTVYLQMNSLKPEDTAVYYCNVGFHHDVFFEYWGQGTQVTVSS

SEQ ID NO: 12729 - protein, 120 aa, synthetic construct
EVQLVESGGGLVQAGDSLRLSCTASGNKQKMLEMGWFRQAPGKEREFVASISARVAYTYYADSVKGRFTISRDDARNTVYLQMNSLKPEDTAVYYCNVVQVTNAGVTEYWGQGTQVTVSS

SEQ ID NO: 12730 - protein, 121 aa, synthetic construct
EVQLVESGGGLVQAGDSLRLSCTASGKACRIVEMGWFRQAPGKEREFVASISRRGEYTYYADSVKGRFTISRDDARNTVYLQMNSLKPEDTAVYYCNVVILDVLVRFREYWGQGTQVTVSS

SEQ ID NO: 12731 - protein, 118 aa, synthetic construct
EVQLVESGGGLVQAGDSLRLSCTASGIMDRVVEMGWFRQAPGKEREFVASISGSIEATYYADSVKGRFTISRDDARNTVYLQMNSLKPEDTAVYYCNVLNVIPWLEYWGQGTQVTVSS

SEQ ID NO: 12732 - protein, 120 aa, synthetic construct
EVQLVESGGGLVQAGDSLRLSCTASGLVWTVIEMGWFRQAPGKEREFVASISGSAVYTYYADSVKGRFTISRDDARNTVYLQMNSLKPEDTAVYYCNVTTGRPDGFVEYWGQGTQVTVSS

SEQ ID NO: 12733 - protein, 122 aa, synthetic construct
EVQLVESGGGLVQAGDSLRLSCTASGRNEGTLEMGWFRQAPGKEREFVASISVQARWTYYADSVKGRFTISRDDARNTVYLQMNSLKPEDTAVYYCNVTKLDLMEHTFIEYWGQGTQVTVSS

SEQ ID NO: 12734 - protein, 117 aa, synthetic construct
EVQLVESGGGLVQAGDSLRLSCTASGRRRSNLEMGWFRQAPGKEREFVASISDVVRYTYYADSVKGRFTISRDDARNTVYLQMNSLKPEDTAVYYCNVTTYAFREYWGQGTQVTVSS

SEQ ID NO: 12735 - protein, 123 aa, synthetic construct
EVQLVESGGGLVQAGDSLRLSCTASGVEKGIMEMGWFRQAPGKEREFVASISRAADYTYYADSVKGRFTISRDDARNTVYLQMNSLKPEDTAVYYCNVVYFIEIPTRSFAEYWGQGTQVTVSS

SEQ ID NO: 12736 - protein, 120 aa, synthetic construct
EVQLVESGGGLVQAGDSLRLSCTASGIIQCVMEMGWFRQAPGKEREFVASISGVGTKTYYADSVKGRFTISRDDARNTVYLQMNSLKPEDTAVYYCNVTVMVVGRFEEYWGQGTQVTVSS

SEQ ID NO: 12737 - protein, 122 aa, synthetic construct
EVQLVESGGGLVQAGDSLRLSCTASGKWVFVIEMGWFRQAPGKEREFVASISGAGGYTYYADSVKGRFTRSREDARNTVYLQMNSLKPEDTAVYYCNVDGWLKAAAGVVEYWGQGTQVTVSS

SEQ ID NO: 12738 - protein, 121 aa, synthetic construct
EVQLVESGGGLVQAGDSLRLSCTASGQRIVFVGMGWFRQAPGKEREFVASISRFHSATYYADSVKGRFTISRDDARNTVYLQMNSLKPEDTAVYYCNVTEGANADTSLEYWGQGTQVTVSS

SEQ ID NO: 12739 - protein, 124 aa, synthetic construct
EVQLVESGGGLVQAGDSLRLSCTASGMVGNVVEMGWFRQAPGKEREFVASISGLGRDTYYADSVKGRFTISRDDARNTVYLQMNSLKPEDTAVYYCNVAVFKAGVAFRGFKEYWGQGTQVTVSS

SEQ ID NO: 12740 - protein, 121 aa, synthetic construct
EVQLVESGGGLVQAGDSLRLSCTASGDVPGVIEMGWFRQAPGKEREFVASISGYMTYTYYADSVKGRFTISRDDARNTVYLQMNSLKPEDTAVYYCNVTACQLPFGIMEYWGQGTQVTVSS

SEQ ID NO: 12741 - protein, 118 aa, synthetic construct
EVQLVESGGGLVQAGDSLRLSCTASGSWKKMAVMGWFRQAPGKEREFVAFGSAGTYYADSVKGRFTISRDDARNTVYLQMNSLKPEDTAVYYCNVDVSDVYGVWTEYWGQGTQVTVSS

SEQ ID NO: 12742 - protein, 120 aa, synthetic construct
EVQLVESGGGLVQAGDSLRLSCTASGYNRSIIEMGWFRQAPGKEREFVASISVVYGATYYADSVKGRFTISRDDARNTVYLQMNSLKPEDTAVYYCNVTSLYVPGFVEYWGQGTQVTVSS

SEQ ID NO: 12743 - protein, 122 aa, synthetic construct
EVQLVESGGGLVQAGDSLRLSCTASGNRSIILEMGWFRQAPGKEREFVASISGNVWYTYYADSVKGRFTISRDDARNTVYLQMNSLKPEDTAVYYCNVTTIDRRVFTSKEYWGQGTQVTVSS

SEQ ID NO: 12744 - protein, 124 aa, synthetic construct
EVQLVESGGGLVQAGDSLRLSCTASGVKGIVVEMGWFRQAPGKEREFVASISGTTSYTYYADSVKGRFTISRDDARNTVYLQMNSLKPEDTAVYYCNVLLYDMGRSRIIMEEYWGQGTQVTVSS

SEQ ID NO: 12745 - protein, 122 aa, synthetic construct
EVQLVESGGGLVQAGDSLRLSCTASGRAGKLMEMGWFRQAPGKEREFVASISASIAWAYYADSVKGRFTISRDDARNTVYLQMNSLKPEDTAVYYCNVTVLVSSVPCFTEYWGQGTQVTVSS

SEQ ID NO: 12746 - protein, 116 aa, synthetic construct
EVQLVESGGGLVQAGDSLRLSCTASGRNRFLEMGWFRQAPGKEREFVASISGSQVYTYYADSVKGRFTISRDDARNTVYLQMNSLKPEDTAVYYCNVVTRILEEYWGQGTQVTVSS

SEQ ID NO: 12747 - protein, 120 aa, synthetic construct
EVQLVESGGGLVQAGDSLRLSCTASGRLGLVIEMGWFRQAPGKEREFVASISSRDGQTYYADSVKGRFTISRDDARNTVYLQMNSLKPEDTALYYCNVTAFDIANKLEYWGQGTQVTVSS

SEQ ID NO: 12748 - protein, 125 aa, synthetic construct
EVQLVESGGGLVQAGDSLRLSCTASGLSQMVEVMGWFRQAPGKEREFVASISMRGVVTYYADSVKGRFTISRDDARNTVYLQMNSLKPEDTAVYYCNVIEFQMAVDHRAQFVEYWGQGTQVTVSS

SEQ ID NO: 12749 - protein, 119 aa, synthetic construct
EVQLVESGGGLVQAGDSLRLSCTASGREGVILEMGWFRQAPEKEREFVASISGNCGRTYYADSVKGRFTISRDDARNTVYLQMNSLKPEDTAVYYCNVTVWLTNFSEYWGQGTQVTVSS

SEQ ID NO: 12750 - protein, 120 aa, synthetic construct
EVQLVESGGGLVQAGDSLRLSCTASGRSGPWLEMGWFRQAPGKEREFVASISGHGHFTYYADSVKGRFTISRDDARNTVYLQMNSLKPEDTAVYYCNVTVFGPRHRSEYWGQGTQVTVSS

SEQ ID NO: 12751 - protein, 118 aa, synthetic construct
EVQLVESGGGLVQAGDSLRLSCTASGPVGQNDVMGWFRQAPGKEREFVASISGRGLGTYYADSVKGRFTISRDDARNTVYLQMNSLKPEDTAVYYCNVLILADWKEYWGQGTQVTVSS

SEQ ID NO: 12752 - protein, 121 aa, synthetic construct
EVQLVESGGGLVQAGDSLRLSCTASGEMGHVLEMGWFRQAPGKEREFVASISGTRRYTYYADSVKGRFTISRDDARNTVYLQMNSLKPEDTAVYYCNVTRLRAGLGLTEYWGQGTQVTVSS

SEQ ID NO: 12753 - protein, 122 aa, synthetic construct
EVQLVESGGGLVQAGDSLRLSCTASGKKLGLIEMGWFRQAPGKEREFVASISDGLGVTYYADSVKGRFTISRDDARNTVYLQMNSLKPEDTAVYYCNVTSFDRDVMRFLEYWGQGTQVTVSS

SEQ ID NO: 12754 - protein, 119 aa, synthetic construct
EVQLVESGGGLVQAGDSLRLSCTASGKIEIALEMGWFRQAPGKEREFVASISVLRGHTYYADSVKGRFTISRDDARNTVYLQMNSLKPEDTAVYYCNVTGICGKFTEYWGQGTQVTVSS

SEQ ID NO: 12755 - protein, 120 aa, synthetic construct
EVQLVESGGGLVQAGDSLRLSCTASGMMALAMEMGWFRQAPGKERAFVASISGFGHDTYYADSVKGRFTISRDDARNTVYLQMNSLKPEDTAVYYCNVDNENTDANLEYWGQGTQVTVSS

SEQ ID NO: 12756 - protein, 119 aa, synthetic construct
EVQLVESGGGLVQAGDSLRLSCTASGGMHNVVEMGWFRQAPGKEREFVASISGAGVFTYYADSVKGRFTISRDDARNTVYLQMNSLKPEDTAVYYCNVTLVNTLFWEYWGQGTQVTVSS

SEQ ID NO: 12757 - protein, 121 aa, synthetic construct
EVQLVESGGGLVQAGDSLRLSCTASGVGSFLVEMGWFRQAPGKEREFVASISNSCTYTYYADSVKGRFTISRDDARNTVYLQMNSLKPEDTAVYYCNVTKLHPGRGKVEYWGQGTQVTVSS

SEQ ID NO: 12758 - protein, 121 aa, synthetic construct
EVQLVESGGGLVQAGDSLRLSCTASGQVIRKVEMGWFRQAPGKEREFVASISYRDDYTYYADSVKGRFTISRDDARNTVYLQMNSLKPEDTAVYYCNVTSVNERNIFDEYWGQGTQVTVSS

SEQ ID NO: 12759 - protein, 123 aa, synthetic construct
EVQLVESGGGLVQAGDSLRLSCTASGVTHRLLEMGWFRQAPGKEREFVASISDKVQITYYADSVKGRFTISRDDARNTVYLQMNSLKPEDTAVYYCNVTGFRPMRCPPFVEYWGQGTQVTVSS

SEQ ID NO: 12760 - protein, 120 aa, synthetic construct
EVQLVESGGGLVQAGDSLRLSCTASGPMGNVVEMGWFRQAPGKEREFVASISSRQVYTYYADSVKGRFTISRDDARNTVYLQMNSLKPEDTAVYYCNVVYTSVIGFREYWGQGTQVTVSS

SEQ ID NO: 12761 - protein, 123 aa, synthetic construct
EVQLVESGGGLVQAGDSLRLSCTASGLMEGVLEMGWFRQAPGKEREFVASISGLRHYTYYADSVKGRFTISRDDARNTVYLQMNSLKPEDTAVYYCNVVYTVAGGMHRFAEYWGQGTQVTVSS

SEQ ID NO: 12762 - protein, 122 aa, synthetic construct
EVQLVESGGGLVQAGDSLRLSCTASGISGRGIEMGWFRQAPGKEREFVASISVEGQYTYYADSVKGRFTISRDDARNTVYLQMNSLKPEDTAVYYCNVTYILLGWRGFHEYWGQGTQVTVSS

SEQ ID NO: 12763 - protein, 125 aa, synthetic construct
EVQLVESGGGLVQAGDSLRLSCTASGPCAQRIGMGWFRQAPGKEREFVASISVCFGVTYYADSVKGRFTISRDDARNTVYLQMNSLKPEDTAVYYCNVSVLRFVGDVIVGFGEYWGQGTQVTVSS

SEQ ID NO: 12764 - protein, 124 aa, synthetic construct
EVQLVESGGGLVQAGDSLRLSCTASGVPEVVMEMGWFRQAPGKEREFVASISGLDARTYYADSVKGRFTISRDDARNTVYLQMNSLKPEDTAVYYCNVVTLDMVRFIGKKVEYWGQGTQVTVSS

SEQ ID NO: 12765 - protein, 121 aa, synthetic construct
EVQLVESGGGLVQAGDSLRLSCTASGRSRSLIEMGWFRQAPGKEREFVASISVRVKFTYYADSVKGRFTISRDDARNTVYLQMNSLKPEDTAVYYCNVTDVRDDFDFQEYWGQGTQVTVSS

SEQ ID NO: 12766 - protein, 121 aa, synthetic construct
EVQLVESGGGLVQAGDSLRLSCTASGKTNSTLEMGWFRQAPGKEREFVASISFKWIYTYYADSVKGRFTISRDDARNTVYLQMNSLKPEDTAVYYCNVTLAGTGYGFAEYWGQGTQVTVSS

SEQ ID NO: 12767 - protein, 125 aa, synthetic construct
EVQLVESGGGLVQAGDSLRLSCTASGGLTAILEMGWFRQAPGKEREFVASISGEGVHTYYADSVKGRFTISRDDARNTVYLQMNSLKPEDTAVYYCNVVSVVVSVGVVVGFREYWGQGTQVTVSS

SEQ ID NO: 12768 - protein, 118 aa, synthetic construct
EVQLVESGGGLVQAGDSLRLSCTASGGIKSWIEMGWFRQAPGKEREFVASISWRAVTYYADSVKGRFTISRDDARNTVYLQMNSLKPEDTAVYYCNVTVIMSHFVEYWGQGTQVTVSS

SEQ ID NO: 12769 - protein, 123 aa, synthetic construct
EVQLVESGGGLVQAGDSLRLSCTASGDYPSMLEMGWFRQAPGKEREFVASISNRLGYTYYADSVKGRFTISRDDARNTVYLQMNSLKPEDTAVYYCNVLYVHVGIASRIVEYWGQGTQVTVSS

SEQ ID NO: 12770 - protein, 121 aa, synthetic construct
EVQLVESGGGLVQAGDSLRLSCTASGFSGDHVEMGWFRQAPGKEREFVASISVQVDYTYYADSVKGRFTISRDDARNTVYLQMNSLKPEDTAVYYCNVSTFVVGEGFAEYWGQGTQVTVSS

SEQ ID NO: 12771 - protein, 119 aa, synthetic construct
EVQLVESGGGLVQAGDSLRLSCTASGEPVGVVEMGWFRQAPGKEREFVASISGRDSYTYYADSVKGRFTISRDDARNTVYLQMNSLKPEDTAVYYCNVTKFDGGFKEYWGQGTQVTVSS

SEQ ID NO: 12772 - protein, 125 aa, synthetic construct
EVQLVESGGGLVQAGDSLRLSCTASGMPGGLVEMGWFRQAPGKEREFVASISRVGGYTYYADSVKGRFTISRDDARNTVYLQMNSLKPEDTAVYYCNVTMINVGKNNVVRFAEYWGQGTQVTVSS

SEQ ID NO: 12773 - protein, 121 aa, synthetic construct
EVQLVESGGGLVQAGDSLRLSCTASGIRGSVLEMGWFRQAPGKEREFVASISARTGYTYYADSVKGRFTISRDDARNTVYLQMNSLKPEDTAVYYCNVTSWDGSGRFKEYWGQGTQVTVSS

SEQ ID NO: 12774 - protein, 120 aa, synthetic construct
EVQLVESGGGLVQAGDSLRLSCTASGVSDSGVEMGWFRQAPGKEREFVASISMRQSYTYYADSVKGRFTISRDDARNTVYLQMNSLKPEDTAVYYCNVVRIVGRMIVEYWGQGTQVTVSS

SEQ ID NO: 12775 - protein, 120 aa, synthetic construct
EVQLVESGGGLVQAGDSLRLSCTASSRMYVLLSMGWFRQAPGKEREFVASISMRAYETYYADSVKGRFTISRDDARNTVYLQMNSLKPEDTAVYYCNVVEADSVGMGEYWGQGTQVTVSS

SEQ ID NO: 12776 - protein, 125 aa, synthetic construct
EVQLVESGGGLVQAGDSLRLSCTASGRKVHIVEMGWFRQAPGKEREFVASISGQMAYTYYADSVKGRFTISRDDARNTVYLQMNSLKPEDTAVYYCNVTDMVVGLRLGLCVYEYWGQGTQVTVSS

SEQ ID NO: 12777 - protein, 117 aa, synthetic construct
EVQLVESGGGLVQAGDSLRLSCTASGHIGGFMEMGWFRQAPGKEREFVASISGFGGLTYYADSVKGRFTISRDAARNTVYLQMNSLKPEDTAVYYCNVYCTRSTEYWGQGTQVTVSS

SEQ ID NO: 12778 - protein, 120 aa, synthetic construct
EVQLVESGGGLVQAGDSLRLSCTASGPVHSAMEMGWFRQAPGKEREFVASISVVHVYTYYADSVKGRFTISRDDARNTVYLQMNSLKPEDTAVYYCNVTGMSAMGLREYWGQGTQVTVSS

SEQ ID NO: 12779 - protein, 124 aa, synthetic construct
EVQLVESGGGLVQAGDSLRLSCTASGLIRGWMEMGWFRQAPGKEREFVASISKDMDYTYYADSVKGRFTISRDDARNTVYLQMNSLKPEDTAVYYCNVTTLTNAQGRIVRDEYWGQGTQVTVSS

SEQ ID NO: 12780 - protein, 125 aa, synthetic construct
EVQLVESGGGLVQAGDSLRLSCTASGSAERGLEMGWFRQAPGKEREFVASISGHRGYTYYADSVKGRFTISRDDARNTVYLQMNSLKPEDTAVYYCNVTYIKMEPSGIIHVIEYWGQGTQVTVSS

SEQ ID NO: 12781 - protein, 120 aa, synthetic construct
EVQLVESGGGLVQAGDSLRLSCTASGQKDSYIEMGWFRQAPGKEREFVASISWRGRLTYYADSVKGRFTISRDDARNTVYLQMNSLKPEDTAVYYCNVTEVVMPGFFEYWGQGTQVTVSS

SEQ ID NO: 12782 - protein, 120 aa, synthetic construct
EVQLVESGGGLVQAGDSLRLSCTASGGRGDVIEMGWFRQAPGKEREFVASISGKGTYTYYADSVKGRFTISRDDARNTVYLQMNSLKPEDTAVYYCNVDCMMEVGYREYWGQGTQVTVSS

SEQ ID NO: 12783 - protein, 124 aa, synthetic construct
EVQLVESGGGLVQAGDSLRLSCTASGVHKRMIEMGWFRQAPGKEREFVASISTQYFYTYYADSVKGRFTISRDDARNTVYLQMNSLKPEDTAVYYCNVVAVLLDNGKMYIQEYWGQGTQVTVSS

SEQ ID NO: 12784 - protein, 119 aa, synthetic construct
EVQLVESGGGLVQAGDSLRLSCTASGQVKAMVEMGWFRQAPGKEREFVASISYWGMYTYYADSVKGRFTISRDDARNTVYLQMNSLKPEDTAVYYCNVSVFDQRIVEYWGQGTQVTVSS

SEQ ID NO: 12785 - protein, 120 aa, synthetic construct
EVQLVESGGGLVQAGDSLRLSCTASGGLYVVLEMGWFRQAPGKEREFVASISGDRMYTYYADSVKGRFTISRDDARNTVYLQMNSLKPEDTAVYYCNVVAFVRGFFAEYWGQGTQVTVSS

SEQ ID NO: 12786 - protein, 119 aa, synthetic construct
EVQLVESGGGLVQAGDSLRLSCTASGNTDNSLEMGWFRQAPGKEREFVASISNRHVYTYYADSVKGRFTISRDDARNTVYLQMNSLKPEDTAVYYCNVVIVARWFTEYWGQGTQVTVSS

SEQ ID NO: 12787 - protein, 120 aa, synthetic construct
EVQLVESGGGLVQAGDSLRLSCTASGMLSKVMEMGWFRQAPGKEREFVASISYSRIYTYYADSVKGRFTISRDDARNTVYLQMNSLKPEDTAVYYCNVTTLGNDGLVEYWGQGTQVTVSS

SEQ ID NO: 12788 - protein, 122 aa, synthetic construct
EVQLVESGGGLVQAGDSLRLSCTASGKVKRVVEMGWFRQAPGKEREFVASISGVRTYTYYADSVKGRFTISRDDARNTVYLQMNSLKPEDTAVYYCNVVRLDTLVGVFIEYWGQGTQVTVSS

SEQ ID NO: 12789 - protein, 125 aa, synthetic construct
EVQLVESGGGLVQAGDSLRLSCTASGMPCVVLEMGWFRQAPGKEREFVASISVRTGVTYYADSVKGRFTISRDDARNTVYLQMNSLKPEDTAVYYCNVTMYCAGSGWLGVFREYWGQGTQVTVSS

SEQ ID NO: 12790 - protein, 121 aa, synthetic construct
EVQLVESGGGLVQAGDSLRLSCTASGACLGLLEMGWFRQAPEKEREFVASISVRMAFTYYADSVKGRFTISRDDARNTVYLQMNSLKPEDTAVYYCNVTTVNVEGRFHEYWGQGTQVTVSS

SEQ ID NO: 12791 - protein, 119 aa, synthetic construct
EVQLVESGGGLVQAGDSLRLSCTASGNDTRMLEMGWFRQAPGKEREFVASISTPMDNTYYADSVKGRFTISRDDARNTVYLQMNSLKPEDTAVYYCNVTTFDGLFFEYWGQGTQVTVSS

SEQ ID NO: 12792 - protein, 120 aa, synthetic construct
EVQLVESGGGLVQAGDSLRLSCTASGSKLRVIEMGWFRQAPGKEREFVASISGVLVYTYYADSVKGRFTISRDDARNTVYLQMNSLKPEDTAVYYCNVVVIDCGYIVEYWGQGTQVTVSS

SEQ ID NO: 12793 - protein, 121 aa, synthetic construct
EVQLVESGGGLVQAGDSLRLSCTASGMTANVIEMGWFRQAPGKEREFVASISGDEVYTYYADSVKGRFTISRDDARNTVYLQMNSLKPEDTAVYYCNVVTLGDTHTFLEYWGQGTQVTVSS

SEQ ID NO: 12794 - protein, 120 aa, synthetic construct
EVQLVESGGGLVQAGDSLRLSCTASGSIRVGSVMGWFRQAPGKEREFVASISVGSDRTYYADSVKGRFTISRDDARNTVYLQMNSLKPEDTAVYYCNVLVHGPQVWNEYWGQGTQVTVSS

SEQ ID NO: 12795 - protein, 119 aa, synthetic construct
EVQLVESGGGLVQAGDSLRLSCTASGMVGDRVDMGWFRQAPGKEREFVASISARESRTYYADSVKGRFTISRDDARNTVYLQMNSLKPEDTAVYYCNVTVFYNGFVEYWGQGTQVTVSS

SEQ ID NO: 12796 - protein, 120 aa, synthetic construct
EVQLVESGGGLVQAGDSLRLSCTASGWWWNMIDMGWFRQAPGKEREFVASISGNDVYTYYADSVKGRFTISRDDARNTVYLQMNSLKPEDTAVYYCNVTAVVLGGFREYWGQGTQVTVSS

SEQ ID NO: 12797 - protein, 121 aa, synthetic construct
EVQLVESGGGLVQAGDSLRLSCTASGSMLHVLEMGWFRQAPGKEREFVASISWRTSYTYYADSVKGRFTISRDDARNTVYLQMNSLKPEDTAVYYCNVTEMRDGVGMVEYWGQGTQVTVSS

SEQ ID NO: 12798 - protein, 122 aa, synthetic construct
EVQLVESGGGLVQAGDSLRLSCTASGILGLVMEMGWFRQAPGKEREFVASISGQTVATYYADSVKGRFTISRDDARNTVYLQMNSLKPEDTAVYYCNVTELAVKVNRWIEYWGQGTQVTVSS

SEQ ID NO: 12799 - protein, 123 aa, synthetic construct
EVQLVESGGGLVQAGDSLRLSCTASGGAFRTVEMGWFRQAPGKEREFVASISGAGGRTYYADSVKGRFTISRDDARNTVYLQMNSLKPEDTAVYYCNVTGIVVVRPLRFVEYWGQGTQVTVSS

SEQ ID NO: 12800 - protein, 118 aa, synthetic construct
EVQLVESGGGLVQAGDSLRLSCTASGKGRDAWSMGWFRQAPGKEREFVASISWPWRATYYADSVKGRFTISRDDARNTVYLQMNSLKPEDTAVYYCNVCEMTHDVEYWGQGTQVTVSS

SEQ ID NO: 12801 - protein, 120 aa, synthetic construct
EVQLVESGGGLVQAGDSLRLSCTASGREDMLVEMGWFRQAPGKEREFVASISGWGISTYYADSVKGRFTISRDDARNTVYLQMNSLKPEDTAVYYCNVTTLQPQGFREYWGQGTQVTVFF

SEQ ID NO: 12802 - protein, 121 aa, synthetic construct
EVQLVESGGGLVQAGDSLRLSCTASGSSVGVMEMGWFRQAPGKEREFVASISGFGHDTYYADSVKGRFTISRDDARNTVYLQMNSLKPEDTAVYYCNVSTLLYYLGVREYWGQGTQVTVSS

SEQ ID NO: 12803 - protein, 119 aa, synthetic construct
EVQLVESGGGLVQAGDSLRLSCTASGDYRLAIEMGWFRQAPGKEREFVASISGANVYTYYADSVKGRFTISRDDARNTVYLQMNSLKPEDTAVYYCNVTMFNTRLNEYWGQGTQVTVSS

SEQ ID NO: 12804 - protein, 119 aa, synthetic construct
EVQLVESGGGLVQAGDSLRLSCTASGSKVAIIEMGWFRQAPGKEREFVASISWDSIYTYYADSVKGRFTISRDDARNTVYLQMNSLKPEDTAVYYCNVTAFNRCKREYWGQGTQVTVSS

SEQ ID NO: 12805 - protein, 124 aa, synthetic construct
EVQLVESGGGLVQAGDSLRLSCTASGEFDTVLEMGWFRQAPGKEREFVASISMRAVYTYYADSVKVCFTISRDDARNTVYLQMNSLKPEDTAVYYCNVAGLRQRAMVLLLEEYWGQGTQVTVSS

SEQ ID NO: 12806 - protein, 119 aa, synthetic construct
EVQLVESGGGLVQAGDSLRLSCTASGFNRHMVEMGWFRQAPGKEREFVASISGVARYTYYADSVKGRFTISRDDARNTVYLQMNSLKPEDTAVYYCNVVIIGNCFVEYWGQGTQVTVSS

SEQ ID NO: 12807 - protein, 121 aa, synthetic construct
EVQLVESGGGLVQAGDSLRLSCTASGDVRWIMEMGWFRQAPGKEREFVASISARASYTYYADSVKGRFTISRDDARNTVYLQMNSLKPEDTAVYYCNVLAVSIPNLIREYWGQGTQVTVSS

SEQ ID NO: 12808 - protein, 121 aa, synthetic construct
EVQLVESGGGLVQAGDSLRLSCTASGGLSVWLEMGWFRQAPGKEREFVASISGSTLYTYYADSVKGRFTISRDDARNTVYLQMNSLKPEDTAVYYCNVSTITKGRCFREYWGQGTQVTVSS

SEQ ID NO: 12809 - protein, 120 aa, synthetic construct
EVQLVESGGGLVQAGDSLRLSCTASGIMWLVLEMGWFRQAPGKEREFVASISGQCEYTYYADSVKGRFTISRDDARNTVYLQMNSLKPEDTAVYYCNVVSVRSIGVREYWGQGTQVTVSS

SEQ ID NO: 12810 - protein, 124 aa, synthetic construct
EVQLVESGGGLVQAGDSLRLSCTASGISGAIIEMGWFRQAPGKEREFVASISGTSVYTYYADSVKGRFTISRDDARNTVYLQMNSLKPEDTAVYYCNVLTIRAIALERTIQEYWGQGTQVTVSS

SEQ ID NO: 12811 - protein, 120 aa, synthetic construct
EVQLVESGGGLVQAGDSLRLSCTASGDPGMAIEMGWFRQAPGKEREFVASISVRRESTYYADSVKGRFTISRDDARNTVYLQMNSLKPEDTAVYYCNVTSLVGVMFREYWGQGTQVTVSS

SEQ ID NO: 12812 - protein, 119 aa, synthetic construct
EVQLVESGGGLVQAGDSLRLSCTASGQLASAIEMGWFRQAPGKEREFVASISVRNRYTYYADSVKGRFTISRDDARNTVYLQMNSLKPEDTAVYYCNVSCCVHSKNEYWGQGTQVTVSS

SEQ ID NO: 12813 - protein, 123 aa, synthetic construct
EVQLVESGGGLVQAGDSLRLSCTASDSLMVVMEMGWFRQAPGKEREFVASISGNGRGTYYADSVKGRFTISRDDARNTVYLQMNSLKPEDTAVYYCNVTMFRETGTQGFIEYWGQGTQVTVSS

SEQ ID NO: 12814 - protein, 120 aa, synthetic construct
EVQLVESGGGLVQAGDSLRLSCTASGDIRLWIEMGWFRQAPGKEREFVASISNNGRYTYYADSVKGRFTISRDDARNTVYLQMNSLKPEDTAVYYCNVVFVRMDGFWEYWGQGTQVTVSS

SEQ ID NO: 12815 - protein, 123 aa, synthetic construct
EVQLVESGGGLVQAGDSLRLSCTASGPVQSMMEMGWFRQAPGKEREFVASISGRVAYTYYAEPVKGRFTISRDDARNTVYLQMNSLKPEDTAVYYCNVTAITKGFVVRFSEYWGQGTQVTVSS

SEQ ID NO: 12816 - protein, 120 aa, synthetic construct
EVQLVESGGGLVQAGDSLRLSCTASGMSGGILEMGWFRQAPGKEREFVASISCHQDYTYYAESVKGRFTISRDDARNTVYLQMNSLKPEDTAVYYCNVVSHSGRAFREYWGQGTQVTVSS

SEQ ID NO: 12817 - protein, 121 aa, synthetic construct
EVQLVESGGGLVQAGDSLRLSCTASGNITGGLEMGWFRQAPGKEREFVASISWRGVLTYYADSVKGRFTISRDDARNTVYLQMNSLKPEDTAVYYCNVTYIAGPRGFREYWGQGTQVTVSS

SEQ ID NO: 12818 - protein, 123 aa, synthetic construct
EVQLVESGGGLVQAGDSLRLSCTASGMAATILEMGWFRQAPGKEREFVASISGIYMYTYYADSVKGRFTISRDDARNTVYLQMNSLKPEDTAVYYCNVTAIHMSRGDRFVEYWGQGTQVTVSS

SEQ ID NO: 12819 - protein, 121 aa, synthetic construct
EVQLVESGGGLVQAGDSLRLSCTASGMRMVFMSMGWFRQAPGKEREFVASISGFRNLTYYADSVKGRFTISRDDARNTVYLQMNSLKPEDTAVYYCNVVEDLTKLWTWEYWGQGTQVTVSS

SEQ ID NO: 12820 - protein, 120 aa, synthetic construct
EVQLVESGGGLVQAGDSLRLSCTASGKQRVRVEMGWFRQAPGKEREFVASISGVWLGTYYADSVKGRFTISRDDARNTVYLQMNSLKPEDTAVYYCNVTDCDELGFVEYWGQGTQVTVSS

SEQ ID NO: 12821 - protein, 119 aa, synthetic construct
EVQLVESGGGLVQAGDSLRLSCTASGRRMVFTGMGWFRQAPGKEREFVASISGFRVATYYADSVKGRFTISRDDARNTVYLQMNSLKPEDTAVYYCNVSDDNRESDEYWGQGTQVTVSS

SEQ ID NO: 12822 - protein, 121 aa, synthetic construct
EVQLVESGGGLVQAGDSLRLSCTASGNKASNIEMGWFRQAPGKEREFVASISSRRSYTYYADSVKGRFTISRDDARNTVYLQMNSLKPEDTAVYYCNVTKCTASWGIAEYWGQGTQVTVSS

SEQ ID NO: 12823 - protein, 120 aa, synthetic construct
EVQLVESGGGLVQAGDSLRLSCTASGKRRVFMEMGWFRQAPGKEREFVASISGLTRYTYYADSVKGRFTISRDDARNTVYLQMNSLKPEDTAVYYCNVDILLNMRFEEYWGQGTQVTVSS

SEQ ID NO: 12824 - protein, 120 aa, synthetic construct
EVQLVESGGGLVQAGDSLRLSCTASGLADSYLEMGWFRQAPGKEREFVASISGGQPYTYYADSVKGRFTISRDDARNTVYLQMNSLKPEDTAVYYCNVWTINTKGVQEYWGQGTQVTVSS

SEQ ID NO: 12825 - protein, 121 aa, synthetic construct
EVQLVESGGGLVQAGDSLRLSCTASGETRQRVEMGWFRQAPGKEREFVASISFDHLYTYYADSVKGRFTISRDDARNTVYLQMNSLKPEDTAVYYCNVVTWCGQSGFHEYWGQGTQVTVSS

SEQ ID NO: 12826 - protein, 123 aa, synthetic construct
EVQLVESGGGLVQAGDSLRLSCTASGNVRSVLEMGWFRQAPGKEREFVASISGHTIATYYADSVKGRFTISRDDARNTVYLQMNSLKPEDTAVYYARCTVFAVRLCAPVVEYWGQGTQVTVSS

SEQ ID NO: 12827 - protein, 123 aa, synthetic construct
EVQLVESGGGLVQAGDSLRLSCTASGHIRAIVEMGWFRQAPGKEREFVASISGARLYTYYADSVKGRFTISRDDARNTVYLQMNSLKPEDTAVYYCNVTCVCNAAKVRIMEYWGQGTQVTVSS

SEQ ID NO: 12828 - protein, 120 aa, synthetic construct
EVQLVESGGGLVQAGDSLRLSCTASGEGTHFIEMGWFRQAPGKEREFVASISVKMSYTYYADSVKGRFTISRDDARNTVYLQMNSLKPEDTAVYYCNVTGLRGGGFLEYWGQGTQVTVSS

SEQ ID NO: 12829 - protein, 117 aa, synthetic construct
EVQLVESGGGLVQAGDSLRLSCTASGHTGDVMIMGWFRQAPGKEREFVASISGRADMTYYADSVKGRFTISRDDARNTVYLQMNSLKPEDTAVYYCNVVTNRIKEYWGQGTQVTVSS

SEQ ID NO: 12830 - protein, 120 aa, synthetic construct
EVQLVESGGGLVQAGDSLRLSCTASGKIDGGMEMGWFRQAPGKEREFVASISVRTVETYYADSVKGRFTISRDDARNTVYLQMNSLKPEDTAVYYCNVSVFTGLRIVEYWGQGTQVTVSS

SEQ ID NO: 12831 - protein, 120 aa, synthetic construct
EVQLVESGGGLVQAGDSLRLSCTASGTRVHILEMGWFRQAPGKEREFVASISRNMNYTYYADSVKGRFTISRDDARNTVYLQMNSLKPEDTAVYYCNVAAVRADSFVEYWGQGTQVTVSS

SEQ ID NO: 12832 - protein, 117 aa, synthetic construct
EVQLVESGGGLVQAGDSLRLSCTASGRDEDYVIMGWFRQAPGKEREFVASISGEKGITYYADSVKGRFTISRDDARNTVYLQMNSLKPEDTAVYYCNVISSRIVEYWGQGTQVTVSS

SEQ ID NO: 12833 - protein, 119 aa, synthetic construct
EVQLVESGGGLVQAGDSLRLSCTASGGKHQMIEMGWFRQAPGKEREFVASISMREAYTYYADSVKGRFTISRDDARNTVYLQMNSLKPEDTAVYYCNVTIISDIRFEYWGQGTQVTVSS

SEQ ID NO: 12834 - protein, 121 aa, synthetic construct
EVQLVESGGGLVQAGDSLRLSCTASGMGRCLIEMGWFRQAPGKEREFVASISGQATYTYYADSVKGRFTISRDDARNTVYLQMNSLKPEDTAVYYCNVVIMNPGVGKGEYWGQGTQVTVSS

SEQ ID NO: 12835 - protein, 119 aa, synthetic construct
EVQLVESGGGLVQAGDSLRLSCTASGLRGGYIEMGWFRQAPGKEREFVASISGTDRYTYYADSVKGRFTISRDDARNTVYLQMNSLKPEDTAVYYCNVVTCMQLIHEYWGQGTQVTVSS

SEQ ID NO: 12836 - protein, 122 aa, synthetic construct
EVQLVESGGGLVQAGDSLRLSCTASGVVDSLMEMGWFRQAPGKEREFVASISMNHMYTYYADSVKGRFTISRDDARNTVYLQMNSLKPEDTAVYYCNVVGVTGICWERYEYWGQGTQVTVSS

SEQ ID NO: 12837 - protein, 123 aa, synthetic construct
EVQLVESGGGLVQAGDSLRLSCTASGPGDMIVDMGWFRQAPGKEREFVASISTRGAYTYYADSVKGRFTISRDDARNTVYLQMNSLKPEDTAVYYCNVTLLGIGRHHGFSEYWGQGTQVTVSS

SEQ ID NO: 12838 - protein, 120 aa, synthetic construct
EVQLVESGGGLVQAGDSLRLSCTASGKEIRPVEMGWFRQAPGKEREFVASISGCGFQTYYADSVKGRFTISRDDARNTVYLQMNSLKPEDTAVYYCNVTALVPRGFREYWGQGTQVTVSS

SEQ ID NO: 12839 - protein, 119 aa, synthetic construct
EVQLVESGGGLVQAGDSLRLSCTASGHRALLVEMGWFRQAPGKEREFVASISGHTVYTYYADSVKGRFTISRDDARNTVYLQMNSLKPEDTAVYYCNVVVLRDTFVEYWGQGTQVTVSS

SEQ ID NO: 12840 - protein, 112 aa, synthetic construct
EVQLVESGGGLVQAGDSLRLSCTASGRLVVVYAMGWFRQAPGKEREFVAVSMGSAFTYYADSVKGRFTISRDDARNTVYLQMNSLKPEDTAVYYCNVDSEYWGQGTQVTVSS

SEQ ID NO: 12841 - protein, 119 aa, synthetic construct
EVQLVESGGGLVQAGDSLRLSCTASGGMLGALEMGWFRQAPGKEREFVASISVPKHFTYYADSVKGRFTISRDDARNTVYLQMNSLKPEDTAVYYCNVTTWLRRFLEYWGQGTQVTVSS

SEQ ID NO: 12842 - protein, 123 aa, synthetic construct
EVQLVESGGGLVQAGDSLRLSCTASGNLHFVVEMGWFRQAPGKEREFVASISGNGHYTYYADSVKGRFTISRDDARNTVYLQMNSLKPEDTAVYYCNVTVWIAVNRSYLREYWGQGTQVTVSS

SEQ ID NO: 12843 - protein, 124 aa, synthetic construct
EVQLVESGGGLVQAGDSLRLSCTASGRLRLVVEMGWFRQAPGKEREFVASISGDLRYTYYADSVKGRFTISRDDARNTVYLQMNSLKPEDTAVYYCNVVCVTLRNSQVGFAEYWGQGTQVTVSS

SEQ ID NO: 12844 - protein, 119 aa, synthetic construct
EVQLVESGGGLVQAGDSLRLSCTASGHIINAMEMGWFRQAPGKEREFVASISVAYSGTYYADSVKGRFTISRDDARNTVYLQMNSLKPEDTAVYYCNVTVLKHVFKEYWGQGTQVTVSS

SEQ ID NO: 12845 - protein, 122 aa, synthetic construct
EVQLVESGGGLVQAGDSLRLSCTASGMGGDMVEMGWFRQAPGKEREFVASISGFHQDTYYADSVKGRFTISRDDARNTVYLQMNSLKPEDTAVYYCNFGALRGLWEDIEEYWGQGTQVTVSS

SEQ ID NO: 12846 - protein, 119 aa, synthetic construct
EVQLVESGGGLVQAGDSLRLSCTASGMLRTAIEMGWFRQAPGKEREFVASISADSAYTYYADSVKGRFTISRDDARNTVYLQMNSLKPEDTAVYYCNVTFFSVRVDEYWGQGTQVTVSS

SEQ ID NO: 12847 - protein, 118 aa, synthetic construct
EVQLVESGGGLVQAGDSLRLSCTASGRARKVLEMGWFRQAPGKERKFVASISGSNFATYYADSVKGRFTISRDDARNTVYLQMNSLKPEDTAVYYCNVTLYAAFKEYWGQGTQVTVSS

SEQ ID NO: 12848 - protein, 124 aa, synthetic construct
EVQLVESGGGLVQAGDSLRLSCTASGILGMVIEMGWFRQAPGKEREFVASISGVSLYTYYADSVKGRFTISRDDARNTVYLQMNSLKPEDTAVYYCNVATFNGSESHVALSEYWGQGTQVTVSS

SEQ ID NO: 12849 - protein, 123 aa, synthetic construct
EVQLVESGGGLVQAGDSLRLSCTASGLIGMAFEMGWFRQAPGKEREFVASISVVHGLTYYADSVKGRFTISRDDARNTVYLQMNSLKPEDTAVYYCNVTSLDPANGYRKVEYWGQGTQVTVSS

SEQ ID NO: 12850 - protein, 121 aa, synthetic construct
EVQLVESGGGLVQAGDSLRLSCTASGRSGLPLEMGWFRQAPGKEREFVASISVMTNYTYYADSVKGRFTISRDDARNTVYLQMNSLKPEDTAVYYCNVVCLVMLLGFAEYWGQGTQVTVSS

SEQ ID NO: 12851 - protein, 120 aa, synthetic construct
EVQLVESGGGLVQAGDSLRLSCTASGHKEVIVEMGWFRQAPGKEREFVASISGQIMYTYYADSVKGRFTISRDDARNTVYLQMNSLKPEDTAVYYCNVVALVGIYLMEYWGQGTQVTVSS

SEQ ID NO: 12852 - protein, 120 aa, synthetic construct
EVQLVESGGGLVQAGDSLRLSCTASGHGLMRVEMGWFRQAPGKEREFVASISCTNHYTYYADSVKGRFTISRDDARNTVYLQMNSLKPEDTAVYYCNVTEVRTTGFSEYWGQGTQVTVSS

SEQ ID NO: 12853 - protein, 119 aa, synthetic construct
EVQLVESGGGLVQAGDSLRLSCTASGFGMDDAVMGWFRQAPGKEREFVASIFVAGFTYYADSVKGRFTISRDDARNTVYLQMNSLKPEDTAVYYCNVWKGSSGVDQEYWGQGTQVTVSS

SEQ ID NO: 12854 - protein, 120 aa, synthetic construct
EVQLVESGGGLVQAGDSLRLSCTASGTTKILVEMGWFRQAPGKEREFVASISGAGAYTYYADSVKGRFTISRDDARNTVYLQMNSLKPEDTAVYYCNVECINIGQFFEYWGQGTQVTVSS

SEQ ID NO: 12855 - protein, 120 aa, synthetic construct
EVQLVESGGGLVQAGDSLRLSCTASGIRDGVMELGWFRQAPGKEREFVASISVANAYTYYADSVKGRFTISRDAARNTVYLQMNSLKPEDTAVYYCNVTVLFFRRFAEYWGQGTQVTVSS

SEQ ID NO: 12856 - protein, 119 aa, synthetic construct
EVQLVESGGGLVQAGDSLRLSCTASGDVTNIIEMGWFRQAPGKEREFVASISYSGIYTYYADSVKGRFTISRDDARNTVYLQMNSLKPEDTAVYYCNVVQLMNKKAEYWGQGTQVTVSS

SEQ ID NO: 12857 - protein, 120 aa, synthetic construct
EVQLVESGGGLVQAGDSLRLSCTASGNILAVVEMGWFRQAPGKEREFVASISVQADYTYYADSVKGRFTISRDDARNTVYLQMNSLKPEDTAVYYCNVTRFSAEGHREYWGQGTQVTVSS

SEQ ID NO: 12858 - protein, 120 aa, synthetic construct
EVQLVESGGGLVQAGDSLRLSCTASGHGWVPVEMGWFRQAPGKEREFVASISGTTRYTYYADSVKGRFTISRDDARNTVYLQMNSLKPEDTAVYYCNVTWIIHSGVGEYWGQGTQVTVSS

SEQ ID NO: 12859 - protein, 120 aa, synthetic construct
EVQLVESGGGLVQAGDSLRLSCTASGTSAIVLEMGWFRQAPGKEREFVASISGYGLNTYYADSVKGRFTISRDDARNTVYLQMNSLKPEDTAVYYFRTTCFDRNVLSEYWGQGTQVTVSS

SEQ ID NO: 12860 - protein, 119 aa, synthetic construct
EVQLVESGGGLVQAGDSLRLSCTASGMVGGMIEMGWFRQAPGKEREFVASISVRGRWTYYADSVKGRFTISRDDARNTVYLQMNSLKPEDTAVYYCNVTVVDTFVHEYWGQGTQVTVSS

SEQ ID NO: 12861 - protein, 119 aa, synthetic construct
EVQLVESGGGLVQAGDSLRLSCTASGELANVMEMGWFRQAPGKEREFVASISWSGSYTYYADSVKGRFTISRDDARNTVYLQMNSLKPEDTAVYYCNVTVLIIRFNEYWGQGTQVTVSS

SEQ ID NO: 12862 - protein, 119 aa, synthetic construct
EVQLVESGGGLVQAGDSLRLSCTASGNPRGVIEMGWFRQAPGKEREFVASISNVVVYTYYADSVKGRFTISRDDARNTVYLQMNSLKPEDTAVYYCNVAVLKNGFVEYWGQGTQVTVSS

SEQ ID NO: 12863 - protein, 121 aa, synthetic construct
EVQLVESGGGLVQAGDSLRLSCTASGKIRYVLEMGWFRQAPGKEREFVASISELRHYTYYADSVKGRFTISRDDARNTVYLQMNSLKPEDTAVYYCNVTSAETNGRFVEYWGQGTQVTVSS

SEQ ID NO: 12864 - protein, 121 aa, synthetic construct
EVQLVESGGGLVQAGDSLRLSCTASGLIGTVIELGWFRQAPGKEREFVASISGSKLYTYYADSVKGRFTISRDDARNTVYLQMNSLKPEDTAVYYCNVTLIDSTGLKMEYWGQGTQVTVSS

SEQ ID NO: 12865 - protein, 120 aa, synthetic construct
EVQLVESGGGLVQAGDSLRLSCTASGNTSQTIEMGWFRQAPGKEREFVASISYWGTYTYYADSVKGRFTISRDDARNTVYLQMNSLKPEDTAVYYCNVTIVARNVLCEYWGQGTQVTVSS

SEQ ID NO: 12866 - protein, 120 aa, synthetic construct
EVQLVESGGGLVQAGDSLRLSCTASGGHRDCIAMDWFRQAPGKEREFVASISVRHGITYYADSVKGRFTISRDDARNTVYLQMNSLKPEDTAVYYCNVIGLWEHLFVEYWGQGTQVTVSS

SEQ ID NO: 12867 - protein, 119 aa, synthetic construct
EVQLVESGGGLVQAGDSLRLSCTASGSPGVMVEMGWFRQAPGKEREFVASISTQGEYTYYADSVKGRFTISRDDARNTVYLQMNSLKPEDTAVYYCNVVRIMDVFREYWGQGTQVTVSS

SEQ ID NO: 12868 - protein, 125 aa, synthetic construct
EVQLVESGGGLVQAGDSLRLSCTASGKSLVVLEMGWFRQAPGKEREFVASISGRDGLTYYADSVKGRFTISRDDARNTVYLQMNSLKPEDTAVYYCNVTSVVLVIGVVHSLVEYWGQGTQVTVSS

SEQ ID NO: 12869 - protein, 125 aa, synthetic construct
EVQLVESGGGLVQAGDSLRLSCTASGNFAGMLEMGWFRQAPGKEREFVASISMHRSETYYADSVKGRFTISRDDARNTVYLQMNSLKPEDTAVYYCNVTKIVRVVNGEYRFLEYWGQGTQVTVSS

SEQ ID NO: 12870 - protein, 118 aa, synthetic construct
EVQLVESGGGLVQAGDSLRLSCTASGVINNPIAMGWFRQAPGKEREFVADTDWHSNTYYADSVKGRFTISRDDARNTVYLQMNSLKPEDTAVYYCNVSLVMMLKQEYWGQGTQVTVSS

SEQ ID NO: 12871 - protein, 121 aa, synthetic construct
EVQLVESGGGLVQAGDSLRLSCTASGAKVMVVEMGWFRQAPGKEREFVASISSISVYTYYADSVKGRFTISRDDARNTVYLQMNSLKPEDTAVYYCNVTVVDRGGFVREYWGQGTQVTVSS

SEQ ID NO: 12872 - protein, 119 aa, synthetic construct
EVQLVESGGGLVQAGDSLRLSCTASGDIMGCMEMGWFRQAPGKEREFVASISNHASGTYYADSVKGRFTISRDDARNTVYLQMNSLKPEDTAVYYCNVTAMTCFKLEYWGQGTQVTVSS

SEQ ID NO: 12873 - protein, 124 aa, synthetic construct
EVQLVESGGGLVQAGDSLRLSCTASDMATTTLEMGWFRQAPGKEREFVASISGSTTYTYYADSVKGRFTISRDDARNTVYLQMNSLKPEDTAVYYCNVTKFRPVDGRILLHEYWGQGTQVTVSS

SEQ ID NO: 12874 - protein, 125 aa, synthetic construct
EVQLVESGGGLVQAGDSLRLSCTASGSALMLEVMGWFRQAPGKEREFVASISRTCKDTYYADSVKGRFTISGDDARNTVYLQMNSLKPEDTAVYYCNVPYGGGIDLLLCRKIEYWGQGTQVTVSS

SEQ ID NO: 12875 - protein, 120 aa, synthetic construct
EVQLVESGGGLVQAGDSLRLSCTASGFTQGMIEMGWFRQAPGKEREFVASISVRKVYTYYADSVKGRFTISRDDARNTVYLQMNSLKPEDTAVYYCRNSLLVGFRIEEYWGQGTQVTVSS

SEQ ID NO: 12876 - protein, 119 aa, synthetic construct
EVQLVESGGGLVQAGDSLRLSCTASGLEMGWFRQAPGKEREFVASISGVGTYTYYADSVKGRFTISRDDARNTVYLQMNSLKPEDTAVYYCNVCCLMVRDIGIAIVEYWGQGTQVTVSS

SEQ ID NO: 12877 - protein, 123 aa, synthetic construct
EVQLVESGGGLVQAGDSLRLSCTASGHVRNLVSMDWFRQAPGKEREFVASISMMQVYTYYADSVKGRFTISRDDARNTVYLQMNSLKPEDTAVYYCNVMSIKVGSSLRFCEYWGQGTQVTVSS

SEQ ID NO: 12878 - protein, 122 aa, synthetic construct
EVQLVESGGGLVQAGDSLRLSCTASGNKGMVIEMGWFRQAPGKEREFVASISHLRGVTYYADSVKGRFTISRDDARNTVYLQMNSLKPEDTAVYYCNVTAFVAGEAVFREYWGQGTQVTVSS

SEQ ID NO: 12879 - protein, 120 aa, synthetic construct
EVQLVESGGGLVQAGDSLRLSCTASGVGGQVVEMGWFRQAPGKEREFVASISGTRIWTYYADSVKGRFTISRDDARNTVYLQMNSLKPEDTAVYYCNVVVVNTGLFEEYWGQGTQVTVSS

SEQ ID NO: 12880 - protein, 121 aa, synthetic construct
EVQLVESGGGLVQAGDSLRLSCTASGYFGKVIEMGWFRQAPGKEREFVASISLHQDYTYYADSVKGRFTISRDDARNTVYLQMNSLKPEDTAVYYCNVVYLGVNIVFGEYWGQGTQVTVSS

SEQ ID NO: 12881 - protein, 122 aa, synthetic construct
EVQLVESGGGLVQAGDSLRLSCTASGWKPSVVEMGWFRQAPGKEREFVASISGRGLSTYYADSVKGRFTISRDDARNTVYLQMNSLKPEDTAVYYCNVTTICGDYAVFIEYWGQGTQVTVSS

SEQ ID NO: 12882 - protein, 121 aa, synthetic construct
EVQLVESGGGLVQAGDSLRLSCTASGMFGRCLEMGWFRQAPGKEREFVASISGEDTRTYYADSVKGRFTISRDDARNTVYLQMNSLKPEDTAVYYCNVMMVTRQGRFNEYWGQGTQVTVSS

SEQ ID NO: 12883 - protein, 120 aa, synthetic construct
EVQLVESGGGLVQAGDSLRLSCTASGMVMDILEMGWFRQAPGKEREFVASISLRAVYTYYADSVKGRFTISRDDARNTVYLQMNSLKPEDTAVYYCNAVIVDELGFYEYWGQGTQVTVSS

SEQ ID NO: 12884 - protein, 122 aa, synthetic construct
EVQLVESGGGLVQAGDSLRLSCTASGTWWVMEMGWFRQAPGKEREFVASISRAGHYTYYADSVKGRFTISRDDARNTVYLQMNSLKPEDTAVYYCNVTVIGVVDAGMITEYWGQGTQVTVSS

SEQ ID NO: 12885 - protein, 119 aa, synthetic construct
EVQLVESGGGLVQAGDSLRLSCTASGTGSVVRIMGWFRQAPGKEREFVASISGAVNFTYYADSVKGRFTISRDDARNTVYLQMNSLKPEDTAVYYCNVVDINPGIREYWGQGTQVTVSS

SEQ ID NO: 12886 - protein, 122 aa, synthetic construct
EVQLVESGGGLVQAGDSLRLSCTASGSNGVMLEMGWFRQAPGKEREFAASISVRDGITYYADSVKGRFTISRDDARNTVYLQMNSLKPEDTAVYYCNVTVVHEVGFGFMEYWGQGTQVTVSS

SEQ ID NO: 12887 - protein, 121 aa, synthetic construct
EVQLVESGGGLVQAGDSLRLSCTASGTYQVIMEMGWFRQAPGKEREFVASISVMRDYTYYADSVKGRFTISRDDARNTVYLQMNSLKPEDTAVYYCNVTECKASMGLLEYWGQGTQVTVSS

SEQ ID NO: 12888 - protein, 119 aa, synthetic construct
EVQLVESGGGLVQAGDSLRLSCTASGARSVTIEMGWFRQAPGKEREFVASISGNLMYTYYADSVKGRFTISRDDARNTVYLQMNSLKPEDTAVYYCNVSMFMGRFIEYWGQGTQVTVSS

SEQ ID NO: 12889 - protein, 120 aa, synthetic construct
EVQLVESGGGLVQAGDSLRLSCTASGHRIVFREMGWFRQAPGKEREFVASISVRTMYTYYADSVKGRFTISRDDARNTVYLQMNSLKPEDTAVYYCNVTAVMGHSIVEYWGQGTQVTVSS

SEQ ID NO: 12890 - protein, 121 aa, synthetic construct
EVQLVESGGGLVQAGDSLRLSCTASGVFSRVLEMGWFRQAPGKEREFVASISDGKEHTYYADSVKGRFTISRDDARNTVYLQMNSLKPEDTAVYYCNVTSIIPGLQFVEYWGQGTQVTVSS

SEQ ID NO: 12891 - protein, 120 aa, synthetic construct
EVQLVESGGGLVQAGDSLRLSCTASGTVTFVMEMGWFRQAPGKEREFVASISGTTRYTYYADSVKGRFTISRDDARNTVYLQMNSLKPEDTAVYYCNASQFVGNGVMEYWGQGTQVTVSS

SEQ ID NO: 12892 - protein, 121 aa, synthetic construct
EVQLVESGGGLVQAGDSLRLSCTVSGRMETVIEMGWFRQAPGKEREFVASISGATRCTYYADSVKGRFTISRDDARNTVYLQMNSLKPEDTAVYYCNVTTVGGGRGVLEYWGQGTQVTVSS

SEQ ID NO: 12893 - protein, 117 aa, synthetic construct
EVQLVESGGGLVQAGDSLRLSCTASGTYIEMGWFRQAPGKEREFVASISGSASYTYYADSVKGRFTISRDDARNTVYLQMNSLKPEDTAVYYCNVVALAKGAIEEYWGQGTQVTVSS

SEQ ID NO: 12894 - protein, 120 aa, synthetic construct
EVQLVESGGGLVQAGDSLRLSCTASGQHEFNVEMGWFRQAPGKEREFVASISGGGFYTYYADSVKGRFTISRDDARNTVYLQMNSLKPEDTAVYYCNVWEVSEVGFREYWGQGTQVTVSS

SEQ ID NO: 12895 - protein, 120 aa, synthetic construct
EVQLVESGGGLVQAGDSLRLSCTTSGNHARVLEMGWFRQAPGKEREFVASISGLRQYTYYADSVKGRFTISRDDARNTVYLQMNSLKPEDTAVYYCNVLVLGRSEFREYWGQGTQVTVSS

SEQ ID NO: 12896 - protein, 120 aa, synthetic construct
EVQLVESGGGLVQAGDSLRLSCTASGLGVKMIEMGWFRQAPGKEREFVASISVGRGHTYYADSVKGRFTISRDDARNTVYLQMNSLKPEDTAVYYCNVTTEVVRGFREYWGQGTQVTVSS

SEQ ID NO: 12897 - protein, 121 aa, synthetic construct
EVQLVESGGGLVQAGDSLRLSCTASGQRIVFQGMGWFRQAPGKEREFVASISGSGAYTYYADSVKGRFTISRDDARNTVYLQMNSLKPEDTAVYYCNVVVVHGGGNITEYWGQGTQVTVSS

SEQ ID NO: 12898 - protein, 121 aa, synthetic construct
EVQLVESGGGLVQAGDSLRLSCTASGGGGTLVEMDWFRQAPGKEREFVASISGTGNNTYYADSVKGRFTISRDDARNTVYLQMNSLKPEDTAVYYCNVWLIYLVRGFVEYWGQGTQVTVSS

SEQ ID NO: 12899 - protein, 121 aa, synthetic construct
EVQLVESGGGLVQAGDSLRLSCTASGRARELIEMGWFRQAPGKEREFVASISYTRGYTYYADSVKGRFTISRDDARNTVYLQMNSLKPEDTAVYYCNVTVWHPGLSFSEYWGQGTQVTVSS

SEQ ID NO: 12900 - protein, 119 aa, synthetic construct
EVQLVESGGGLVQAGDSLRLSCTASGFVDSAIELCWFRQAPGKEREFVASISMRKADTYYADSVKGRFTISRDDARNTVYLQMNSLKPEDTAVYYCNVLVNINKDREYWGQGTQVTVSS

SEQ ID NO: 12901 - protein, 120 aa, synthetic construct
EVQLVESGGGLVQAGDSLRLSCTASGMGKEFLEMGWFRQAPGKEREFVASISVRLYDTYYADSVKGRFTISRDDARNTVYLQMNSLKPEDTAVYYCNVTVLGMHRFTEYWGQGTQVTVSS

SEQ ID NO: 12902 - protein, 121 aa, synthetic construct
EVQLVESGGGLVQAGDSLRLSCTASGCVEHKIEMGWFRQAPGKEREFVASISNKGAYTYYADSVKGRFTISRDDARNTVYLQMNSLKPEDTAVYYCNVTVLDVGMGFQEYWGQGTQVTVSS

SEQ ID NO: 12903 - protein, 124 aa, synthetic construct
EVQLVESGGGLVQAGDSLRLSCTASGMFERVLEMGWFRQAPGKEREFVASISGRFEYTYYADSVKGRFTISRDDARNTVYLQMNSLKPEDTAVYYCNVMSLRKVGRSEVFAEYWGQGTQVTVSS

SEQ ID NO: 12904 - protein, 119 aa, synthetic construct
EVQLVESGGGLVQAGDSLRLSCTASGVVKRLLEMGWFRQAPGKEREFVASISDGDYTYYADSVKGRFTISRDDARNTVYLQMNSLKPEDTAVYYCNVVIASEVCIHEYWGQGTQVTVSS

SEQ ID NO: 12905 - protein, 124 aa, synthetic construct
EVQLVESGGGLVQAGDSLRLSCTASGQDGKVVEMGWFRQAPGKEREFVASISGGGLYTYYADSVKGRFTISRDDARNTVYLQMNSLKPEDTAVYYCNVTIVRLRLVIQAFEEYWGQGTQVTVSS

SEQ ID NO: 12906 - protein, 120 aa, synthetic construct
EVQLVESGGGLVQAGDSLRLSCTASGTNQDQVEMGWFRQAPGKEREFVASISRRDDYTYYADSVKGRFTISRDDARNTVYLQMNSLKPEDTAVYYCNVVMVGFGRFYEYWGQGTQVTVSS

SEQ ID NO: 12907 - protein, 119 aa, synthetic construct
EVQLVESGGGLVQAGDSLRLSCTASGAIGCVIDMGWFRQAPGKEREFVASISGVNLLTYYADSVKGRFTISRDDARNTVYLQMNSLKPEDTAVYYCNVTCIVKRFVEYWGQGTQVTVSS

SEQ ID NO: 12908 - protein, 121 aa, synthetic construct
EVQLVESGGGLVQAGDSLRLSCTASGNYINVVEMGWFRQAPGKEREFVASISGMAVYTYYADSVKGRFTISRDDARNTVYLQMNSLKPEDTAVYYCNVAIITETLRFTEYWGQGTQVTVSS

SEQ ID NO: 12909 - protein, 122 aa, synthetic construct
EVQLVESGGGLVQAGDSLRLSCTASGDRAQGVEMGWFRQAPGKEREFVASISVRCGDTYYADSVKGRFTISRDDARNTVYLQMNSLKPEDTAVYYCNVVRFIVHRHAFVEYWGQGTQVTVSS

SEQ ID NO: 12910 - protein, 119 aa, synthetic construct
EVQLVESGGGLVQAGDSLRLSCTASGVVGVKLEMGWFRQAPGKEREFVASISVREDTTYYADSVKGRFTISRDDARNTVYLQMNSLKPEDTAVYYCNVTVSKLGFEEYWGQGTQVTVSS

SEQ ID NO: 12911 - protein, 121 aa, synthetic construct
EVQLVESGGGLVQAGDSLRLSCTASGLPRSIMEMGWFRQAPGKEREFVASISHMRYFTYYADSVKGRFTISRDDARNTVYLQMNSLKPEDTAVYYCNVTVFREGFGFAEYWGQGTQVTVSS

SEQ ID NO: 12912 - protein, 121 aa, synthetic construct
EVQLVESGGGLVQAGDSLRLSCTASGGRSIIVEMGWFRQAPGKEREFVASISGRVDYTYYADSVKGRFTISRDDARNTVYLQMNSLKPEDTAVYYCNVTTWGDVDGVMEYWGQGTQVTVSS

SEQ ID NO: 12913 - protein, 120 aa, synthetic construct
EVQLVESGGGLVQAGDSLRLSCTASGGSGFVLEMGWVRQAPGKERAFVASISWNGLTYYADSVKGRFTISRDDARNTVYLQMNSLKPEDTAVYYCNVVLHTRLLRFEEYWGQGTQVTVSS

SEQ ID NO: 12914 - protein, 120 aa, synthetic construct
EVQLVESGGGLVQAGDSLRLSCTASGVGGDWLEMGWFRQAPGKEREFVASISSNGEYTYYADSVKGRFTISRDDARNTVYLQMNSLKPEDTAVYYCNVFSIRGGMWIEYWGQGTQVTVSS

SEQ ID NO: 12915 - protein, 119 aa, synthetic construct
EVQLVESGGGLVQAGDSLRLSCTASGVVHGVIEMGWFRQAPGKEREFVASISVTNIYTYYADSVKGRFTISRDDARNTVYLQMNSLKPEDTAVYYCNVLRVLMGVCEYWGQGTQVTVSS

SEQ ID NO: 12916 - protein, 120 aa, synthetic construct
EVQLVESGGGLVQAGDSLRLSCTASGPMLFVLEMGWFRQAPGKEREFVASISCLSTYTYYADSVKGRFTISRDDARNTVYLQMNSLKPEDTAVYYCNVTLVVDRGFREYWGQGTQVTVSS

SEQ ID NO: 12917 - protein, 120 aa, synthetic construct
EVQLVESGGGLVQAGDSLRLSCTASGKRERAMEMGWFRQAPGKEREFVASISVRWGSTYYADSVKGRFTISRDDARNTVYLQMNSLKPEDTAVYYCNVTELVHCAFFEYWGQGTQVTVSS

SEQ ID NO: 12918 - protein, 120 aa, synthetic construct
EVQLVESGGGLVQAGDSLRLSCTASGCVNGFIEMGWFRQAPGKEREFVASISAVHAYTYYADSVKGRFTISRDDARNTVYLQMNSLKPEDTAVYYCNVVVIDVQGKSEYWGQGTQVTVSS

SEQ ID NO: 12919 - protein, 119 aa, synthetic construct
EVQLVESGGGLVQAGDSLRLSCTASGPILCIIEMGWFRQAPGKEREFVASISGKDVGTYYADSVKGRFTISRDDARNTVYLQMNSLKPEDTAVYYCRHTTFRSVLREYWGQGTQVTVSS

SEQ ID NO: 12920 - protein, 119 aa, synthetic construct
EVQLVESGGGLVQAGDSLRLSCTASGTMREFLEMGWFRQAPGKEREFVASISGKRHYTYYADSVKGRFTISRDDARNTVYLQMNSLKPEDTAVYYCNVTVVLMRVHEYWGQGTQVTVSS

SEQ ID NO: 12921 - protein, 121 aa, synthetic construct
EVQLVESGGGLVQAGDSLRLSCTASGREDHRLDMGWFRQAPGKEREFVASISVRTAWTYYADSVKGRFTISRDDARNTVYLQMNSLKPEDTAVYYCNVTVLNVKVGFMEYWGQGTQVTVSS

SEQ ID NO: 12922 - protein, 117 aa, synthetic construct
EVQLVESGGGLVQAGDSLRLSCTASGCIGLVLEMGWFRQAPGKEREFVASISGNDNGTYYADSVKGRFTISRDDARNTVYLQMNSLKPEDTAVYYCNVTIIDFREYWGQGTQVTVSS

SEQ ID NO: 12923 - protein, 121 aa, synthetic construct
EVQLVESGGGLVQAGDSLRLSCTASGQNRRTIEMGWFRQAPGKEREFVASISGNGTYTYYADSVKGRFTISRDDARNTVYLQMNSLKPEDTAVYYCNVTTMAVGNGKQEYWGQGTQVTVSS

SEQ ID NO: 12924 - protein, 120 aa, synthetic construct
EVQLVESGGGLVQAGDSLRLSCTASGLGLDVLEMGWFRQAPGKEREFVASISGRYLRTYYADSVKGRFTISRDDARNTVYLQMNSLKPEDTAVYYCNVTVIDAMHFREYWGQGTQVTVSS

SEQ ID NO: 12925 - protein, 120 aa, synthetic construct
EVQLVESGGGLVQAGDSLRLSCTASGVPGSKLEMGWFRQAPGKEREFVASISADTAYTYYADSVKGRFTISRDDARNTVYLQMNSLKPEDTAVYYCNVTCFEGIVLKEYWGQGTQVTVSS

SEQ ID NO: 12926 - protein, 119 aa, synthetic construct
EVQLVESGGGLVQAGDSLRLSCTASGDNVIVLEMGWFRQAPGKEREFVASISASVGRTYYADSVKGRFTISRDDARNTVYLQMNSLKPEDTAVYYCRTDALREGIKEYWGQGTQVTVSS

SEQ ID NO: 12927 - protein, 124 aa, synthetic construct
EVQLVESGGGLVQAGDSLRLSCTASGHYSTMLEMGWFRQAPGKEREFVASISVGRDYTYYADSVKGRFTISRDDARNTVYLQMNSLKPEDTAVYYCNVTEVVNRGRNVLFKEYWGQGTQVTVSS

SEQ ID NO: 12928 - protein, 120 aa, synthetic construct
EVQLVESGGGLVQAGDSLRLSCTASGRVRGGLEMGWFRQAPGKEREFVASISVHDDYTYYADSVKGRFTISRDDARNTVYLQMNSLKPEDTAVYYCNVSCFVDSVMREYWGQGTQVTVSS

SEQ ID NO: 12929 - protein, 117 aa, synthetic construct
EVQLVESGGGLVQAGDSLRLSCTASGIWGRVLEMGWFRQAPGKEREFVASISGEGGYTYYADSVKGRFTISRDDARNTVYLQMNSLKPEDTAVYYCNVTIIGFSEYWGQGTQVTVSS

SEQ ID NO: 12930 - protein, 119 aa, synthetic construct
EVQLVESGGGLVQAGDSLRLSCTASGHSSMVIEMGWFRQAPGKEREFVASISGRGSYTYYADSVKGRFTISRDDARNTVYLQMNSLKPEDTAVYYCNVIRGDVRNAEYWGQGTQVTVSS

SEQ ID NO: 12931 - protein, 120 aa, synthetic construct
EVQLVESGGGLVQAGDSLRLSCTASGGRFGNLEMGWFRQAPGKEREFVASISMKDDYTYYADSVKGRFTISRDDARNTVYLQMNSLKPEDTAVYYCNVVSLRLDGFKEYWGQGTQVTVSS

SEQ ID NO: 12932 - protein, 120 aa, synthetic construct
EVQLVESGGGLVQAGDSLRLSCTASGNVTGVIEMGWFRQAPGKEREFVASISNVGPYTYYADSVKGRFTISRDDARNTVYLQMNSLKPEDTAVYYCNVSAFLLSGLREYWGQGTQVTVSS

SEQ ID NO: 12933 - protein, 119 aa, synthetic construct
EVQLVESGGGLVQAGDSLRLSCTASGNVRGVIEMGWFRQAPGKEREFVASISRDGCYTYYADSVKGRFTISRDDARNTVYLQMNSLKPEDTAVYYCNVSLIWFLIVEYWGQGTQVTVSS

SEQ ID NO: 12934 - protein, 117 aa, synthetic construct
EVQLVESGGGLVQAGDSLRLSCTASGMSARWIEMGWFRQAPGKEREFVASISFDGMYTYYADSVKGRFTISRDDARNTVYLQMNSLKPEDTAVYYCNMTGGALIEYWGQGTQVTVSS

SEQ ID NO: 12935 - protein, 122 aa, synthetic construct
EVQLVESGGGLVQAGDSLRLSCTASGCRMVVVEMGWFRQAPGKEREFVASISGKVSYTYYADSVKGRFTISRDDARNTVYLQMNSLKPEDTAVYYCNVTTVGHLDNRFREYWGQGTQVTVSS

SEQ ID NO: 12936 - protein, 121 aa, synthetic construct
EVQLVESGGGLVQAGDSLRLSCTASGGMDTVIGMGWFRQAPGKEREFVASISATRGDTYYADSVKGRFTISRDDARNTVYLQMNSLKPEDTAVYYCNVIMFIVMQGFKEYWGQGTQVTVSS

SEQ ID NO: 12937 - protein, 119 aa, synthetic construct
EVQLVESGGGLVQAGDSLRLSCTASGAKGNVVEMGWFRQAPGKEREFVASISGFHQDTYYADSVKGRFTISRDDARNTVYLQMNSLKPEDTAVYYCNVTTSVVQSDEYWGQGTQVTVSS

SEQ ID NO: 12938 - protein, 118 aa, synthetic construct
EVQLVESGGGLVQAGDSLRLSCTASGKGMIFHRMGWFRQAPGKEREFVASISGFLERTYYADSVKGRFTISRDDARNTVYLQMNSLKPEDTAVYYCNVTVRKRISEYWGQGTQVTVSS

SEQ ID NO: 12939 - protein, 120 aa, synthetic construct
EVQLVESGGGLVQAGDSLRLSCTASGVLRFPVEMGWFRQAPGKEREFVASISMHCVYTYYADSVKGRFTISRDDARNTVYLQMNSLKPEDTAVYYCNVSDMGTSGLAEYWGQGTQVTVSS

SEQ ID NO: 12940 - protein, 122 aa, synthetic construct
EVQLVESGGGLVQAGDSLRLSCTASGMGNKILEMGWFRQAPGKEREFVASISGLSSYTYYADSVKGRFTISRDDARNTVYLQMNSLKPEDTAVYYCNVTLFGLVGDGKREYWGQGTQVTVSS

SEQ ID NO: 12941 - protein, 119 aa, synthetic construct
EVQLVESGGGLVQAGDSLRLSCTASGPVNDVIEMGWFRQAPGKEREFVASISCNCGYTYYADSVKGRFTISRDDARNTVYLQMNSLKPEDTAVYYCNVTARRRLFSEYWGQGTQVTVSS

SEQ ID NO: 12942 - protein, 121 aa, synthetic construct
EVQLVESGGGLVQAGDSLRLSCTASGHRNINIEMGWFRQAPGKEREFVASISVADGYTYYAGSVKVSFTISRDAARNTVYLQMNSLKPEDTAVYYCNVVSIHRVDGFREYWGQGTQVTVSS

SEQ ID NO: 12943 - protein, 121 aa, synthetic construct
EVQLVESGGGLVQAGDSLRLSCTASGSRTRMLEMGWFRQAPGKEREFVASISGTVMYTYYADSVKGRFTISRDDARNTVYLQMNSLKPEDTAVYYCNVTAIYDNVFLREYWGQGTQVTVSS

SEQ ID NO: 12944 - protein, 119 aa, synthetic construct
EVQLVESGGGLVQAGDSLRLSCTASGIEWRIIEMGWFRQAPGKEREFVASISMGEEYTYYADSVKGRFTISRDDARNTVYLQMNSLKPEDTAVYYCNVVTLDRRKWEYWGQGTQVTVSS

SEQ ID NO: 12945 - protein, 121 aa, synthetic construct
EVQLVESGGGLVQAGDSLRLSCTASGGLWFRLEMGWFRQAPGKEREFVASISDVQDYTYYADSVKGRFTISRDDARNTVYLQMNSLKPEDTAVYYCNVNGMSAEVRYREYWGQGTQVTVSS

SEQ ID NO: 12946 - protein, 124 aa, synthetic construct
EVQLVESGGGLVQAGDSLRLSCTASGDMLVFRSMGWFRQAPGKEREFVASISGFGSHTYYADSVKGRFTISRDDARNTVYLQMNSLKPEDTAVYYCNVIGTMRLPSKIVAPEYWGQGTQVTVSS

SEQ ID NO: 12947 - protein, 125 aa, synthetic construct
EVQLVESGGGLVQAGDSLRLSCTASGIVVPALEMGWFRQAPGKEREFVASISVSFGNTYYADSVKGRFTISRDDARNTVYLQMNSLKPEDTAVYYCNVTSVVCLDFVFQGFVEYWGQGTQVTVSS

SEQ ID NO: 12948 - protein, 122 aa, synthetic construct
EVQLVESGGGLVQAGDSLRLSCTASDIAGTELEMGWFRQAPGKEREFVASISRVRGYTYYADSVKGRFTISRDDARNTVYLQMNSLKPEDTAVYYCNVTSIVFVDRGLREYWGQGTQVTVSS

SEQ ID NO: 12949 - protein, 121 aa, synthetic construct
EVQLVESGGGLVQAGDSLRLSCTASGDAVVRLEMGWFRQAPGKEREFVASISGVGDYTYYADSVKGRFTISRDDARNTVYLQMNSLKPEDTAVYYCNVVVLGFRFEFTEYWGQGTQVTVSS

SEQ ID NO: 12950 - protein, 119 aa, synthetic construct
EVQLVESGGGLVQAGDSLRLSCTASGRVVDAIEMGWFRQAPGKEREFVASISDSMAYTYYADSVKGRFTISRDDARNTVYLQMNSLKPEDTAVYYCNVTLVDRGFREYWGQGTQVTVSS

SEQ ID NO: 12951 - protein, 121 aa, synthetic construct
EVQLVESGGGLVQAGDSLRLSCTASGVSARVFLMDWFRQAPGKEREFVASISMWTDYTYYADSVKGRFTISRDDARNTVYLQMNSLKPEDTAVYYCNVGVLCTDNNFVEYWGQGTQVTVSS

SEQ ID NO: 12952 - protein, 119 aa, synthetic construct
EVQLVESGGGLVQAGDSLRLSCTASGLTRPIVDMGWFRQAPGKEREFVASISNNDAYTYYAYSVKGRFTISRDDARNTVYLQMNSLKPEDTAVYYCNVVIVNYVFHEYWGQGTQVTVSS

SEQ ID NO: 12953 - protein, 118 aa, synthetic construct
EVQLVESGGGLVQAGDSLRLSCTASGLRILEMGWFRQAPGKEREFVASISQYGVYTYYADSVKGRFTISRDDARNTVYLQMNSLKPEDTAVYYCNVVAVVMAGFVEYWGQGTQVTVSS

SEQ ID NO: 12954 - protein, 122 aa, synthetic construct
EVQLVESGGGLVQAGDSLRLSCTASGDPDSVLEMGWFRQAPGKEREFVASISNNGGYTYYADSVKGRFTISRDDARNTVYLQMNSLKPEDTAVYYCNVVLVVGSVLVFKEYWGQGTQVTVSS

SEQ ID NO: 12955 - protein, 121 aa, synthetic construct
EVQLVESGGGLVQAGDSLRLSCTASGDGRAALGMGWFRQAPGKEREFVASISVRASSTYYADSVKGRFTISRDDARNTVYLQMNSLKPEDTAVYYCNVTVVLIGRGFSEYWGQGTQVTVSS

SEQ ID NO: 12956 - protein, 115 aa, synthetic construct
EVQLVESGGGLVQAGDSLRLSCTASGLEMGWFRQAPGKEREFVASISWQGYYTYYADSVKGRFTISRDDARNTVYLQMNSLKPEDTAVYYCNVTILVGRYLVEYWGQGTQVTVSS

SEQ ID NO: 12957 - protein, 121 aa, synthetic construct
EVQLVESGGGLVQAGDSLRLSCTASGRRTRVIEMGWFRQAPGKEREFVASISGSVVYTYYADSVKGRFTISRDDARNTVYLQMNSLKPEDTAVYYCNVTLLVEVAKIREYWGQGTQVTVSS

SEQ ID NO: 12958 - protein, 122 aa, synthetic construct
EVQLVESGGGLVQAGDSLRLSCTASGNRRTLIEMGWFRQAPGKEREFVASISGDLVYTYYADSVKGRFTISRDDARNTVYLQMNSLKPEDTAVYYCNVTMLMSCNSVMREYWGQGTQVTVSS

SEQ ID NO: 12959 - protein, 120 aa, synthetic construct
EVQLVESGGGLVQAGDSLRLSCTASGSGNGGLEMGWFRQAPGKEREFVASISMMTRYTYYADSVKGRFTISRDDARNTVYLQMNSLKPEDTAVYYCNVTTVVNRGLAEYWGQGTQVTVSS

SEQ ID NO: 12960 - protein, 121 aa, synthetic construct
EVQLVESGGGLVQAGDSLRLSCTASGIISRPLEMCWFRQAPGKEREFVASISGMGLMTYYADSVKGRFTISRDDARNTVYLQMNSLKPEDTAVYYCNVTTVSVLLLFGEYWGQGTQVTVSS

SEQ ID NO: 12961 - protein, 120 aa, synthetic construct
EVQLVESGGGLVQAGDSLRLSCTASGMGSMIVRMGWFRQAPGKEREFVASISGSLSKTYYADSVKGRFTISRDDARNTVYLQMNSLKPEDTAVYYCNVVNFSVAAFGEYWGQGTQVTVSS

SEQ ID NO: 12962 - protein, 120 aa, synthetic construct
EVQLVESGGGLVQAGDSLRLSCTASGKVGAFLEMGWFRQAPGKEREFVASISGSGDYTYYADSVKGRFTISRDDARNTVYLQMNSLKPEDTAVYYCNVLFVVTWNFVEYWGQGTQVTVSS

SEQ ID NO: 12963 - protein, 114 aa, synthetic construct
EVQLVESGGGLVQAGDSLRLSCTASGTVMGWFRQAPGKEREFVASISNHTYYADSVKGRFTISRDDARNTVYLQMNSLKPEDTAVYYCNVSMPSIYAIWASEYWGQGTQVTVSS

SEQ ID NO: 12964 - protein, 123 aa, synthetic construct
EVQLVESGGGLVQAGDSLRLSCTASGDVIGMMEMGWFRQAPGKEREFVASISVVGDYTYYADSVKGRFTISRDDARNTVYLQMNSLKPEDTAVYYCNVLYVMTRGIITIIEYWGQGTQVTVSS

SEQ ID NO: 12965 - protein, 120 aa, synthetic construct
EVQLVESGGGLVQAGDSLRLSCTASGVTVGLLAMDWFRQAPGKEREFVASISTRHDYTYYADSVKGRFTISRDDARNTVYLQMNSLKPEDTAVYYCNVIGVREHSVREYWGQGTQVTVSS

SEQ ID NO: 12966 - protein, 121 aa, synthetic construct
EVQLVESGGGLVQAGDSLRLSCTASGNLRGWLEMGWFRQAPGKEREFVASISIVGSYTYYADSVKGRFTISRDDARNTVYLQMNSLKPEDTAVYYCNVAILRDHCGLLEYWGQGTQVTVSS

SEQ ID NO: 12967 - protein, 125 aa, synthetic construct
EVQLVESGGGLVQAGDSLRLSCTASGESAKYLEMGWFRQAPGKEREFVASISSRTAETYYADSVKGRFTISRDDARNTVYLQMNSLKPEDTAVYYCNVTVMIDKDGMVLGFMEYWGQGTQVTVSS

SEQ ID NO: 12968 - protein, 120 aa, synthetic construct
EVQLVESGGGLVQAGDSLRLSCTASGPLMSILEMGWFRQAPGKEREFVASISGHGVYTYYADSVKGRFTISRDDARNTVYLQMNSLKPEDTAVYYCNVTLLAPRCGDEYWGQGTQVTVSS

SEQ ID NO: 12969 - protein, 120 aa, synthetic construct
EVQLVESGGGLVQAGDSLRLSCTASGSVRDALEMGWFRQAPGKEREFVASISFRGVVTYYADSVKGRFTISRDDARNTVYLQMNSLKPEDTAVYYCNVTALSKHAFTEYWGQGTQVTVSS

SEQ ID NO: 12970 - protein, 122 aa, synthetic construct
EVQLVESGGGLVQAGDSLRLSCTASGKLRRIMEMGWFRQAPGKEREFVASISVPGSRTYYTDSVKGRFTISRDDARNTVYLQMNSLKPEDTAVYYCNVTSINRLILAFLEYWGQGTQVTVSS

SEQ ID NO: 12971 - protein, 119 aa, synthetic construct
EVQLVESGGGLVQAGDSLRLSCTASGNVRGMLEMGWFRQAPGKEREFVASISIMRRITYYADSVKGRFTISRDDARNTVYLQMNSLKPEDTAVYYCNVTSLSSRFVEYWGQGTQVTVSS

SEQ ID NO: 12972 - protein, 120 aa, synthetic construct
EVQLVESGGGLVQAGDSLRLSCTASGSVGVVLEMGWFRQAPGKEREFVASISYGDAETYYADSVKGRFTISRDDARNTVYLQMNSLKPEDTAVYYCRMTLINADRFMEYWGQGTQVTVSS

SEQ ID NO: 12973 - protein, 121 aa, synthetic construct
EVQLVESGGGLVQAGDSLRLSCTASGSGGKYVEMGWFRQAPGKEREFVASISAMTTYTYYADSVKGRFTISRDDARNTVYLQMNSLKPEDTAVYYCNVTISGGTMRFVEYWGQGTQVTVSS

SEQ ID NO: 12974 - protein, 123 aa, synthetic construct
EVQLVESGGGLVQAGDSLRLSCTASGMQARVIEMGWFRQAPGKEREFVASISGGGFGTYYADSVKGRFTISRDDARNTVYLQMNSLKPEDTAVYYCNVTGWLDSVPFGFAEYWGQGTQVTVSS

SEQ ID NO: 12975 - protein, 123 aa, synthetic construct
EVQLVESGGGLVQAGDSLRLSCTASGFTSVLTVMGWFRQAPGKEREFVASISMTGAMTYYADSVKGRFTISRDDARNTVYLQMNSLKPEDTAVYYCNVVMFRRWSGDGFVEYWGQGTQVTVSS

SEQ ID NO: 12976 - protein, 121 aa, synthetic construct
EVQLVESGGGLVQAGDSLRLSCTASGLPNGVLEMGWFRQAPGKEREFVASISANMLYTYYADSVKGRFTISRDDARNTVYLQMNSLKPEDTAVYYCNVSSFTVLSGVKEYWGQGTQVTVSS

SEQ ID NO: 12977 - protein, 121 aa, synthetic construct
EVQLVESGGGLVQAGDSLRLSCTASGLDATQIEMGWFRQAPGKEREFVASISWKLWYTYYADSVKGRFTISRDDARNTVYLQMNSLKPEDTAVYYCNATVHVYGVRFVEYWGQGTQVTVSS

SEQ ID NO: 12978 - protein, 119 aa, synthetic construct
EVQLVESGGGLVQAGDSLRLSCTASGLPDVVIEMGWFRQAPGKEREFVASISANYDYTYYADSVKGRFTISRDDARNTVYLQMNSLKPEDTAVYYCNVTTVGVGLGEYWGQGTQVTVSS

SEQ ID NO: 12979 - protein, 120 aa, synthetic construct
EVQLVESGGGLVQAGDSLRLSCTASGDAGMLLEMGWFRQAPGKEREFVASISGKELYTYYADSVKGRFTISRDDARNTVYLQMNSLKPEDTAVYYCNVVMMQAHEFREYWGQGTQVTVSS

SEQ ID NO: 12980 - protein, 120 aa, synthetic construct
EVQLVESGGGLVQAGDSLRLSCTASGVGGIILEMGWFRQAPGKEREFVASISGGGFYTYYADSVKGRFTISRDDARNTVYLQMNSLKPEDTAVYYCNVGVVGAQSFNEYWGQGTQVTVSS

SEQ ID NO: 12981 - protein, 123 aa, synthetic construct
EVQLVESGGGLVQAGDSLRLSCTAGGICVGWWAMGWFRQAPGKEREFVASISSDVTETYYADSVKGRFTISRDDARNTVYLQMNSLKPEDTAVYYCNVRPGQEWAQLMRVEYWGQGTQVTVSS

SEQ ID NO: 12982 - protein, 120 aa, synthetic construct
EVQLVESGGGLVQAGDSLRLSCTASGCTHKVVEMGWFRQAPGKEREFVASISGDMHYTYYADSVKGRFTISRDDARNTVYLQMNSLKPEDTAVYYGNVVVWLRVLIREYWGQGTQVTVSS

SEQ ID NO: 12983 - protein, 120 aa, synthetic construct
EVQLVESGGGLVQAGDSLRLSCTASGIASKIVEMGWFRQAPGKEREFVASISGVAFYTYYADSVKGRFTISRDDARNTVYLQMNSLKPEDTAVYYCNVAVLWGGLFGEYWGQGTQVTVSS

SEQ ID NO: 12984 - protein, 121 aa, synthetic construct
EVQLVESGGGLVQAGDSLRLSCTASGAWLSVIEMGWFRQAPGKEREFVASISVRRIYTYYADSVKGRFTISRDDARNTVYLQMNSLKPEDTAVYYCNVTRIQVGCGFSEYWGQGTQVTVSS

SEQ ID NO: 12985 - protein, 120 aa, synthetic construct
EVQLVESGGGLVQAGDSLRLSCTASGGVGELIEMGWFRQAPGKEREFVASISVQRDYTYYADSVKGRFTISRDDARNTVYLQMNSLKPEDTAVYYCNVVCLVVFTFAEYWGQGTQVTVSS

SEQ ID NO: 12986 - protein, 120 aa, synthetic construct
EVQLVESGGGLVQAGDSLRLSCTASGMGGDMVEMGWFRQAPGKEREFVASISVVSSYTYYADSVKGRFTISRDDARNTVYLQMNSLKPEDTAVYYCNVTGIVFGRIKEYWGQGTQVTVSS

SEQ ID NO: 12987 - protein, 125 aa, synthetic construct
EVQLVESGGGLVQAGDSLRLSCTASGRIRMMIEMGWFRQAPGKEREFVASISGFGANTYYADSVKGRFTISRDDARNTVYLQMNSLKPEDTAVYYCNVEKCAIMGMEHFTWNEYWGQGTQVTVSS

SEQ ID NO: 12988 - protein, 118 aa, synthetic construct
EVQLVESGGGLVQAGDSLRLSCTASGGHNDLIEMGWFRQAPGKEREFVASISTNSEYTYYADSVKGRFTISRDDARNTVYLQMNSLKPEDTAVYYCNVSGSMTGPEYWGQGTQVTVSS

SEQ ID NO: 12989 - protein, 120 aa, synthetic construct
EVQLVESGGGLVQAGDSLRLSCTASGKEGLTIEMGWFRQAPGKEREFVASISGMNRYTYYADSVKGRFTISRDDARNTVYLQMNSLKPEDTAVYYCNVLMMMDGLPVEYWGQGTQVTVSS

SEQ ID NO: 12990 - protein, 119 aa, synthetic construct
EVQLVESGGGLVQAGDSLRLSCTASGVEGVLVEMGWFRQAPGKEREFVASISGVRLYTYYADSVKGRFTISRDDARNTVYLQMNSLKPEDTAVYYCNVVGMTRIFLEYWGQGTQVTVSS

SEQ ID NO: 12991 - protein, 117 aa, synthetic construct
EVQLVESGGGLVQAGDSLRLSCTASGDKTTVVIMGWFRQAPGKEREFVASISGAIGVTYYADSVKGRFTISRDDARNTVYLQMNSLKPEDTAVYYCNVVTDRIIEYWGQGTQVTVSS

SEQ ID NO: 12992 - protein, 120 aa, synthetic construct
EVQLVESGGGLVQAGDSLRLSCTASGRKRVIVEMGWFRQAPGKEREFVASISGTAVYTYYADSVKGRFTISRDDARNTVYLQMNSLKPEDTAVYYCNVTKIEENVVREYWGQGTQVTVSS

SEQ ID NO: 12993 - protein, 117 aa, synthetic construct
EVQLVESGGGLVQAGDSLRLSCTASGDCGWIVEMGWFRQAPGKEREFVASISGSVPYTYYADSVKGRFTISRDDARNTVYLQMNSLKPEDTAVYYCNVTTLFFREYWGQGTQVTVSS

SEQ ID NO: 12994 - protein, 120 aa, synthetic construct
EVQLVESGGGLVQAGDSLRLSCTASGAGCYLIRMGWFRQAPGKEREFVASISDHVRHTYYADSVKGRFTISRDDARNTVYLQMNSLKPEDTAVYYCNVVIFGVEHFGEYWGQGTQVTVSS

SEQ ID NO: 12995 - protein, 119 aa, synthetic construct
EVQLVESGGGLVQAGDSLRLSCTASGDVRIVIEMGWFRQAPGKEREFVASISGQHVYTYYADSVKGRFTISRDDARNTVYLQMNSLKPEDTAVYYCNVTGIAASFYEYWGQGTQVTVSS

SEQ ID NO: 12996 - protein, 119 aa, synthetic construct
EVQLVESGGGLVQAGDSLRLSCTASGSVVGMVEMGWFRQAPGKEREFVASISGGRTYTYYADSVKGRFTISRDDARNTVYLQMNSLKPEDTAVYYCNVVILSVGFVEYWGQGTQVTVSS

SEQ ID NO: 12997 - protein, 124 aa, synthetic construct
EVQLVESGGGLVQAGDSLRLSCTASGGRIVFLMMGWFRQAPGKELEFVSSISGVGLMTYYADSVKGRFTISRDAARNTVYLQMNSLKPEDTAVYYCNVIQGDGSGMYMAGREYWGQGTQVTVSS

SEQ ID NO: 12998 - protein, 122 aa, synthetic construct
EVQLVESGGGLVQAGDSLRLSCTASGTAWVIMEMGWFRQAPGKEREFVASISGSCNATYYADSVKGRFTISRDDARNTVYLQMNSLKPEDTAVYYCNVTVFDREYTMFSEYWGQGTQVTVSS

SEQ ID NO: 12999 - protein, 117 aa, synthetic construct
EVQLVESGGGLVQAGDSLRLSCTASGNRVVFRLMGWFRQAPGKEREFVASISGFKQCTYYADSVKGRFTISRDDARNTVYLQMNSLKPEDTAVYYCNVGQSCDVEYWGQGTQVTVSS

SEQ ID NO: 13000 - protein, 121 aa, synthetic construct
EVQLVESGGGLVQAGDSLRLSCTASGPRPYILEMGWFRQAPGKEREFVASISGMRVFTYYADSVKGRFTISRDDARNTVYLQMNSLKPEDTAVYYCNVTTIEGIVGFIEYWGQGTQVTVSS

SEQ ID NO: 13001 - protein, 120 aa, synthetic construct
EVQLVESGGGLVQAGDSLRLSCTASGNLPAVIEMGWFRQAPGKEREFVASISWDGDYTYYADSVKGRFTISRDDARNTVYLQMNSLKPEDTAVYYCNVTIFMNAGFGEYWGQGTQVTVSS

SEQ ID NO: 13002 - protein, 125 aa, synthetic construct
EVQLVESGGGLVQAGDSLRLSCTASGRNCLFLEMGWFRQAPGKEREFVASISGKHSGTYYADSVKGRFTISRDDARNTVYLQMNSLKPEDTAVYYCNVTGFIIDDVHNVHFQEYWGQGTQVTVSS

SEQ ID NO: 13003 - protein, 121 aa, synthetic construct
EVQLVESGGGLVQAGDSLRLSCTASGRMAWVLGMGWFRQAPGKEREFVASISMRGSITYYADSVKGRFTISRDDARNTVYLQMNSLKPEDTAVYYCNVTTVKESVGFIEYWGQGTQVTVSS

SEQ ID NO: 13004 - protein, 121 aa, synthetic construct
EVQLVESGGGLVQAGDSLRLSCTASGDRETIVEMGWFRQAPGKEREFVASISGRQTYTYYADSVKGRFTISRDDARNTVYLQMNSLKPEDTAVYYCNVWDVLSSGAITEYWGQGTQVTVSS

SEQ ID NO: 13005 - protein, 124 aa, synthetic construct
EVQLVESGGGLVQAGDSLRLSCTASGRMTDSPGMGWFRQAPGKEREFVASISAAGYATYYADSVKGRFTISRDDARNTVYLQMNSLKPEDTAVYYCNVGWFVSDVVIVLGQEYWGQGTQVTVSS

SEQ ID NO: 13006 - protein, 120 aa, synthetic construct
EVQLVESGGGLVQAGDSLRLSCTASGTGNMMMSMGWFRQAPGKEREFVASISMLRAYTYYADSVKGRFTISRDDARNTVYLQMNSLKPEDTAVYYCNVTVFDGEGFTEYWGQGTQVTVSS

SEQ ID NO: 13007 - protein, 124 aa, synthetic construct
EVQLVESGGGLVQAGDSLRLSCTASGGPVELVEMGWFRQAPGKEREFVASISGRANYTYYADSVKGRFTISRDDARNTVYLQMNSLKPEDTAVYYCNVVTYGGTHATRRFSEYWGQGTQVTVSS

SEQ ID NO: 13008 - protein, 121 aa, synthetic construct
EVQLVESGGGLVQAGDSLRLSCTASGYLEMGWFRQAPGKEREFVASISGRDTSTYYADSVKGRFTISRDDARNTVYLQMNSLKPEDTAVYYCNVTICLHDAPAGISFVEYWGQGTQVTVSS

SEQ ID NO: 13009 - protein, 118 aa, synthetic construct
EVQLVESGGGLVQAGDSLRLSCTASLNCSILEMGWFRQAPGKEREFVASISTDGVYTYYADSVKGRFTISRDDARNTVYLQMNSLKPEDTAVYYCNVLIFNGVFVEYWGQGTQVTVSS

SEQ ID NO: 13010 - protein, 121 aa, synthetic construct
EVQLVESGGGLVQAGDSLRLSCTASGFNNFLLEMGWFRQAPGKEREFVASISSRVNTTYYADSVKGRFTISRDDARNTVYLQMNSLKPEDTAVYYCNVTAVTSFGFFVEYWGQGTQVTVSS

SEQ ID NO: 13011 - protein, 117 aa, synthetic construct
EVQLVESGGGLVQAGDSLRLSCTASGRRADVVEMGWFRQAPGKEREFVASISGFGGLTYYADSVKGRFTISRDDARNTVYLQMNSLKPEDTAVYYCNVLVVNKIEYWGQGTQVTVSS

SEQ ID NO: 13012 - protein, 119 aa, synthetic construct
EVQLVESGGGLVQAGDSLRLSCTASGASETMVDMGWFRQAPGKEREFVASISGTNVYTYYADSVKGRFTISRDDARNTVYLQMNSLKPEDTAVYYCNVTVLRGRFWEYWGQGTQVTVSS

SEQ ID NO: 13013 - protein, 122 aa, synthetic construct
EVQLVESGGGLVQAGDSLRLSCTASGLLHTVIEMGWFRQAPGKEREFVASISNMLIYTYYADSVKGRFTISRDDARNTVYLQMNSLKPEDTAVYYCNVVVLNIGLARFVEYWGQGTQVTVSS

SEQ ID NO: 13014 - protein, 120 aa, synthetic construct
EVQLVESGGGLVQAGDSLRLSCTASGPRLVVVDMGWFRQAPGKEREFVASISNRQSYTYYADSVKGRFTISRDDARNTVYLQMNSLKPEDTAVYYCNVTGLTQLKFVEYWGQGTQVTVSS

SEQ ID NO: 13015 - protein, 120 aa, synthetic construct
EVQLVESGGGLVQAGDSLRLSCTASGEHGYVLEMGWFRQAPGKEREFVASISGRGGFTYYADSVKGRFTISRDDARNTVYLQMNSLKPEDTAVYYCNVTALALASFIEYWGQGTQVTVSS

SEQ ID NO: 13016 - protein, 122 aa, synthetic construct
EVQLVESGGGLVQAGDSLRLSCTASGLMGRIMEMGWFRQAPGKEREFVASISGFHSATYYADSVKGRFTISRDDARNTVYLQMNSLKPEDTAVYYCNVHHIGGPGLVVNEYWGQGTQVTVSS

SEQ ID NO: 13017 - protein, 121 aa, synthetic construct
EVQLVESGGGLVQAGDSLRLSCTASGVVRCALEMGWFRQAPGKEREFVASISVRQEYTYYADSVKGRFTISRDDARNTVYLQMNSLKPEDTAVYYCNVVAVTRTLRFMEYWGQGTQVTVSS

SEQ ID NO: 13018 - protein, 119 aa, synthetic construct
EVQLVESGGGLVQAGDSLRLSCTASGNGEGAVEMGWFRQAPGKEREFVASISVWRNYTYYADSVKGRFTISRDDARNTVYLQMNSLKPEDTAVYYCNVLQVLSKVMEYWGQGTQVTVSS

SEQ ID NO: 13019 - protein, 121 aa, synthetic construct
EVQLVESGGGLVQAGDSLRLSCTASGLMWVEGQMGWFRQAPGKEREFVASISNGLRITYYADSVKGRFTISRDDARNTVYLQMNSLKPEDTAVYYCNVKGFSAIMRYVEYWGQGTQVTVSS

SEQ ID NO: 13020 - protein, 120 aa, synthetic construct
EVQLVESGGGLVQAGDSLRLSCTASGVVENVMEMGWFRQAPGKEREFVASISRSGAYTYYADSVKGRFTISRDDARNTVYLQMNSLKPEDTAVYYCNVTLFEVLGFLEYWGQGTQVTVSS

SEQ ID NO: 13021 - protein, 120 aa, synthetic construct
EVQLVESGGGLVQAGDSLRLSCTASGFNHVFLEMGWFRQAPGKEREFVASISNVNVYTYYADSVKGRFTISRDDARNTVYLQMNSLKPEDTAVYYCNVVGIMGCRKIEYWGQGTQVTVSS

SEQ ID NO: 13022 - protein, 122 aa, synthetic construct
EVQLVESGGGLVQAGDSLRLSCTASGEGNVTIEMGWFRQAPGKEREFVASISCRAVYTYYADSVKGRFTISRDDARNTVYLQMNSLKPEDTAVYYCNVSVMRLMDGHVLEYWGQGTQVTVSS

SEQ ID NO: 13023 - protein, 122 aa, synthetic construct
EVQLVESGGGLVQAGDSLRLSCTASGLGPLIIEMGWFRQAPGKEREFVASISGGGAYTYYADSVKGRFTISRDDARNTVYLQMNSLKPEDTAVYYCNVSWFDEASVEFDEYWGQGTQVTVSS

SEQ ID NO: 13024 - protein, 120 aa, synthetic construct
EVQLVESGGGLVQAGDSLRLSCTASGSVLRLVRMGWFRQAPGKEREFVASISGSMWITYYADSVKGRFTISRDDARNTVYLQMNSLKPEDTAVYYCNVVSFGVAVFGEYWGQGTQVTVSS

SEQ ID NO: 13025 - protein, 118 aa, synthetic construct
EVQLVESGGGLVQAGDSLRLSCTASGPIEREDVMGWFRQAPGKEREFVASISSERMVTYYADSVKGRFTISRDDARNTVYLQMNSLKPEDTAVYYCNVLVLRWWMEYWGQGTQVTVSS

SEQ ID NO: 13026 - protein, 123 aa, synthetic construct
EVQLVESGGGLVQAGDSLRLSCTASRGTGILEMGWFRQAPGKEREFVASISMNVHYTYYADSVKGRFTISRDDARNTVYLQMNSLKPEDTAVYYCNVWQVVAGSHGVTFCEYWGQGTQVTVSS

SEQ ID NO: 13027 - protein, 120 aa, synthetic construct
EVQLVESGGGLVQAGDSLRLSCTASGLGEGGVEMGWFRQAPGKEREFVASISMTRAYTYYADSVKGRFTISRDDARNTVYLQMNSLKPEDTAVYYCNVWTVVDMCVREYWGQGTQVTVSS

SEQ ID NO: 13028 - protein, 123 aa, synthetic construct
EVQLVESGGGLVQAGDSLRLSCTASGNTVTVMEMGWFRQAPGKEREFVASISRLDTYTYYADSVKGRFTISRDDARNTVYLQMNSLKPEDTAVYYCNVTLPQHIGYASFAEYWGQGTQVTVSS

SEQ ID NO: 13029 - protein, 120 aa, synthetic construct
EVQLVESGGGLVQAGDSLRLSCTASGNQVRMLEMGWFRQAPEKEREFVASISGSLVYTYYADSVKGRFTISRDDARNTVYLQMNSLKPEDTAVYYCNATHVWSGRIGEYWGQGTQVTVSS

SEQ ID NO: 13030 - protein, 122 aa, synthetic construct
EVQLVESGGGLVQAGDSLRLSCTASGSGSAVIEMGWFRQAPGKEREFVASISGVNGDTYYADSVKGRFTISRDDARNTVYLQMNSLKPEDTAVYYCNVTRFQRMGQQFTEYWGQGTQVTVSS

SEQ ID NO: 13031 - protein, 120 aa, synthetic construct
EVQLVESGGGLVQAGDSLRLSCTASGKVKMLIEMGWFRQAPGKEREFVASISNTHAGTDYADSVKGRFTISRDDARNTVYLQMNSLKPEDTAVYYCNVTTSMRTYFQEYWGQGTQVTVSS

SEQ ID NO: 13032 - protein, 117 aa, synthetic construct
EVQLVESGGGLVQAGDSLRLSCTASGHNTVFMEMGWFRQAPGKEREFVASISTSTLYTYYADSVKGRFTISRDDARNTVYLQMNSLKPEDTAVYYCNVTCLDFDEYWGQGTQVTVSS

SEQ ID NO: 13033 - protein, 121 aa, synthetic construct
EVQLVESGGGLVQAGDSLRLSCTASGGVGGTIEMGWFRQAPGKEREFVASISGMRCYTYYADSVKGRFTISRDDARNTVYLQMNSLKPEDTAVYYCNVSQITNELGLAEYWGQGTQVTVSS

SEQ ID NO: 13034 - protein, 124 aa, synthetic construct
EVQLVESGGGLVQAGDSLRLSCTASGNNSARIEMGWFRQAPGKEREFVASISAKDAFTYYADSVKGRFTISRDDARNTVYLQMNSLKPEDTAVYYCNVTCIDVVMQSVNISEYWGQGTQVTVSS

SEQ ID NO: 13035 - protein, 124 aa, synthetic construct
EVQLVESGGGLVQAGDSLRLSCTASGIDEGIVEMGWFRQAPGKEREFVASISGVTTYTYYADSVKGRFTISRDDARNTVYLQMNSLKPEDTAVYYCNVLHVGRSRGRAQLAEYWGQGTQVTVSS

SEQ ID NO: 13036 - protein, 120 aa, synthetic construct
EVQLVESGGGLVQAGDSLRLSCTASGDVNDWMEMGWFRQAPGKEREFVASISGRGVYTYYADAVKGRFTISRDDARNTVYLQMNSLKPEDTAVYYCNGTSFTLAGKIEYWGQGTQVTVSS

SEQ ID NO: 13037 - protein, 120 aa, synthetic construct
EVQLVESGGGLVQAGDSLRLSCTASGGIAIMIEMGWFRQAPGKEREFVASISINHGCTYYADSVKGRFTISRDDARNTVYLQMNSLKPEDTAVYYCNVTGLVHDRFTEYWGQGTQVTVSS

SEQ ID NO: 13038 - protein, 125 aa, synthetic construct
EVQLVESGGGLVQAGDSLRLSCTASGNAVMALEMGWFRQAPGKEREFVASISGSVEYTYYADSVKGRFTISRDDARNTVYLQMNSLKPEDTAVYYCNVTAILIAGAGTSMFQEYWGQGTQVTVSS

SEQ ID NO: 13039 - protein, 120 aa, synthetic construct
EVQLVESGGGLVQAGDSLRLSCTASGRVVSWMEMGWFRQAPGKEREFVASISGARDYTYYADSVKGRFTISRDDARNTVYLQMNSLKPEDTAVYYCNVMTWMMRTFVEYWGQGTQVTVSS

SEQ ID NO: 13040 - protein, 121 aa, synthetic construct
EVQLVESGGGLVQAGDSLRLSCTASGINSVGIEMGWFRQAPGKEREFVASISMRSDYTYYADSVKGRFTISRDDARNTVYLQMNSLKPEDTAVYYCNVTVMLNGPYLHEYWGQGTQVTVSS

SEQ ID NO: 13041 - protein, 117 aa, synthetic construct
EVQLVESGGGLVQAGDSLRLSCTASGPSAEIAIMGWFRQAPGKEREFVASISGAAHLTYYADSVKGRFTISRDDARNTVYLQMNSLKPEDTAVYYCNVVSWRIREYWGQGTQVTVSS

SEQ ID NO: 13042 - protein, 125 aa, synthetic construct
EVQLVESGGGLVQAGDSLRLSCTASGDHIILVEMGWFRQAPGKEREFVASISGQSDWTYYADSVKGRFTISRDDARNTVYLQMNSLKPEDTAVYYCNVTGITAHPASVRYFLEYWGQGTQVTVSS

SEQ ID NO: 13043 - protein, 124 aa, synthetic construct
EVQLVESGGGLVQAGDSLRLSCTASGCRETYIEMGWFRQAPGKEREFVASISGSSGGTYYADSVKGRFTISRDDARNTVYLQMNSLKPEDTAVYYCNVTDLVTSPNFFGKMEYWGQGTQVTVSS

SEQ ID NO: 13044 - protein, 121 aa, synthetic construct
EVQLVESGGGLVQAGDSLRLSCTASGRFDTVLEMGWFRQAPGKEREFVASISAIGASTYYADSVKGRFTISRDDARNTVYLQMNSLKPEDTAVYYCNVTSHRVNRGFIEYWGQGTQVTVSS

SEQ ID NO: 13045 - protein, 121 aa, synthetic construct
EVQLVESGGGLVQAGDSLRLSCTASGYNKILVEMGWFRQAPGKEREFVASISGVGLYTYYADSVKGRFTISRDDARNTVYLQMNSLKPEDTAVYYCNVTSFDMEYNVREYWGQGTQVTVSS

SEQ ID NO: 13046 - protein, 124 aa, synthetic construct
EVQLVESGGGLVQAGDSLRLSCTASGVDKAGLEMGWVRQAPGKEREFVASISMRVLYTYYADSVKGRFTISRDDARNTVYLQMNSLKPEDTAVYYCNVVVIGGTGRFGFVDEYWGQGTQVTVSS

SEQ ID NO: 13047 - protein, 119 aa, synthetic construct
EVQLVESGGGLVQAGDSLRLSCTASGIKGRMLEMGWFRQAPGKEREFVASISDRIMATYYADSVKGRFTISRDDARNTVYLQMNSLKPEDTAVYYCNVLAIGMVIMEYWGQGTQVTVSS

SEQ ID NO: 13048 - protein, 120 aa, synthetic construct
EVQLVESGGGLVQAGDSLRLSCTASGDINWVFEMGWFRQAPGKEREFVASISCKVRYTYYADSVKGRFTISRDDARNTVYLQMNSLKPEDTAVYYCNVTGFFVREFREYWGQGTQVTVSS

SEQ ID NO: 13049 - protein, 125 aa, synthetic construct
EVQLVESGGGLVQAGDSLRLSCTASGHLLDMIVMGWFRQAPGKEREFVASISGTTMHTYYADSVKGRFTISRDDARNTVYLQMNSLKPEDTAVYYCNVLKMIRRVGEIARFLEYWGQGTQVTVSS

SEQ ID NO: 13050 - protein, 118 aa, synthetic construct
EVQLVESGGGLVQAGDSLRLSCTASGSDVILLEMGWFRQAPGKEREFVASISWGARYTYYADSVKGRFTISRDDARNTVYLQMNSLKPEDTAVYYCNVTLLVGFAEYWGQGTQVTVSS

SEQ ID NO: 13051 - protein, 120 aa, synthetic construct
EVQLVESGGGLVQAGDSLRLSCTASGGMSHIVEMGWFRQAPGKEREFVASISGGSQSTYYADSVKGRFTISRDDARNTVYLQMNSLKPEDTAVYYCNVTLFQGSAFAEYWGQGTQVTVSS

SEQ ID NO: 13052 - protein, 119 aa, synthetic construct
EVQLVESGGGLVQAGDSLRLSCTASGISETVVDMGWFRQAPGKEREFVASISTDSMYTYYADSVKGRFTISRDDARNTVYLQMNSLKPEDTAVYYCNVTTISVKKKEYWGQGTQVTVSS

SEQ ID NO: 13053 - protein, 124 aa, synthetic construct
EVQLVESGGGLVQAGDSLRLSCTASGKKTTLIEMGWFRQAPGKEREFVASISVRDGLTYYADSVKGRFTISRDDARNTVYLQMNSLKPEDTAVYYCNVTAVLVHGWVVNISEYWGQGTQVTVSS

SEQ ID NO: 13054 - protein, 120 aa, synthetic construct
EVQLVESGGGLVQAGDSLRLSCTASGGFADMIEMGWFRQAPGKEREFVASISCRWGMTYYADSVKGRFTISRDDARNTVYLQMNSLKPEDTAVYYCNVTAWSLVRFAEYWGQGTQVTVSS

SEQ ID NO: 13055 - protein, 120 aa, synthetic construct
EVQLVESGGGLVQAGDSLRLSCTASGILNGLVEMGWFRQAPGKEREFVASISGTRAYTYYADSVKGRFTISRDDARNTVYLQMNSLKPEDTAVYYCNVVLKSCVRFLEYWGQGTQVTVSS

SEQ ID NO: 13056 - protein, 119 aa, synthetic construct
EVQLVESGGGLVQAGDSLRLSCTASGIPQGFLEMGWFRQAPGKEREFVASISNVMTYTYYADSVKGRFTISRDDARNTVYLQMNSLKPEDTAVYYCNVTLFLRMFFEYWGQGTQVTVSS

SEQ ID NO: 13057 - protein, 123 aa, synthetic construct
EVQLVESGGGLVQAGDSLRLSCTASGDMGEFMEMGWFRQAPGKEREFVASISGRTTYTYYADSVKGRFTISRDDARNTVYLQMNSLKPEDTAVYYCNVFRLLVKVVVSFIEYWGQGTQVTVSS

SEQ ID NO: 13058 - protein, 118 aa, synthetic construct
EVQLVESGGGLVQAGDSLRLSCTASGIRVVVMTMGWFRQAPGKEREFVASISGLGHDTYYADSVKGRFTISRDDARNTVYLQMNSLKPEDTAVYYCNVMEEDRMKEYWGQGTQVTVSS

SEQ ID NO: 13059 - protein, 119 aa, synthetic construct
EVQLVESGGGLVQAGDSLRLSCTASGSQGKVIEMGWFRQAPGKERKFVASISAVTIYTYYADSVKGRFTISRDDARNTVYLQMNSLKPEDTAVYYCNVVRVDRGIGEYWGQGTQVTVSS

SEQ ID NO: 13060 - protein, 120 aa, synthetic construct
EVQLVESGGGLVQAGDSLRLSCTASGDLCSAMEMCWFRQAPGKEREFVASISTRDKYTYYADSVKGRFTISRDDARNTVYLQMNSLKPEDTAVYYCNVVIIDTAAFVEYWGQGTQVTVSS

SEQ ID NO: 13061 - protein, 121 aa, synthetic construct
EVQLVESGGGLVQAGDSLRLSCTASGTMLGGIEMVWFRQAPGKEREFVASISLRSYYTYYADSVKGRFTISRDDARNTVYLQMNSLKPEDTAVYYCNVTRMLSDFSRQEYWGQGTQVTVSS

SEQ ID NO: 13062 - protein, 119 aa, synthetic construct
EVQLVESGGGLVQAGDSLRLSCTASGNERVIIEMGWFRQAPGKEREFVASISRGSAYTYYADSVKGRFTISRDDARNTVYLQMNSLKPEDTAVYYCNVLAVNVYVVEYWGQGTQVTVSS

SEQ ID NO: 13063 - protein, 117 aa, synthetic construct
EVQLVESGGGLVQAGDSLRLSCTASGRRSNKLEMGWFRQAPGKEREFVASISMRGHYTYYADSVKGRFTISRDDARNTVYLQMNSLKPEDTAVYYCNVSLMNFKEYWGQGTQVTVSS

SEQ ID NO: 13064 - protein, 120 aa, synthetic construct
EVQLVESGGGLVQAGDSLRLSCTASGPVGCVIEMGWFRQAPGKEREFVASISSKNAYTYYADSVKGRFTISRDDARNTVYLQMNSLKPEDTAVYYCNVTSVAIMSIFEYWGQGTQVTVSS

SEQ ID NO: 13065 - protein, 123 aa, synthetic construct
EVQLVESGGGLVQAGDSLRLSCTASGAPGDVLEMGWFRQAPGKEREFVASISGRNLLTYYADSVKGRFTISRDDARNTVYLQMNSLKPEDTAVYYCNVTTFQPSGRMNFGEYWGQGTQVTASS

SEQ ID NO: 13066 - protein, 119 aa, synthetic construct
EVQLVESGGGLVQAGDSLRLSCTASGMFRGALEMGWFRQAPGKEREFVASISGNNGNTYYADSVKGRFTISRDDARNTVYLQMNSLKPEDTAVYYCNVTRLIIYVEEYWGQGTQVTVSS

SEQ ID NO: 13067 - protein, 122 aa, synthetic construct
EVQLVESGGGLVQAGDSLRLSCTASGRKNQVIEMGWFRQSPGKEREFVASISDRTEYTYYADSVKGRFTISRDDARNTVYLQMNSLKPEDTAVYYCNVLLSFAYVDDEVEYWGQGTQVTVSS

SEQ ID NO: 13068 - protein, 117 aa, synthetic construct
EVQLVESGGGLVQAGDSLRLSCTASGNVLWMGWFRQAPGKEREFVASISIIGVVTYYADSVKGRFTISRDDARNTVYLQMNSLKPEDTAVYYCNVILREVCDFGEYWGQGTQVTVSS

SEQ ID NO: 13069 - protein, 120 aa, synthetic construct
EVQLVESGGGLVQAGDSLRLSCTASGINRGSLEMGWFRQAPGKEREFVASISGFGLYTYYADSVKGRFTISRDDARNTVYLQMNSLKPEDTAVYYCNVTVVCNNNFLEYWGQGTQVTVSS

SEQ ID NO: 13070 - protein, 117 aa, synthetic construct
EVQLVESGGGLVQAGDSLRLSCTASGSSSVVLEMGWFRQAPGKEREFVASISGNVHYTYYADSVKGRFTISRDDARNTVYLQMNSLKPEDTAVYYCNVVTRGFSEYWGQGTQVTVSS

SEQ ID NO: 13071 - protein, 120 aa, synthetic construct
EVQLVESGGGLVQAGDSLRLSCTASGMGVQIMEMGWFRQAPGKEREFVASISGIGIYTYYADSVKGRFTISRDDARNTVYLQMNSLKPEDTAVYYCNVTYLYVGQKVEYWGQGTQVTVSS

SEQ ID NO: 13072 - protein, 121 aa, synthetic construct
EVQLVESGGGLVQAGDSLRLSCTASFPMRVWYMGWFRQAPGKEREFVASISWPFVDTYYADSVKGRFTISRDDARNTVYLQMNSLKPEDTAVYYCNVTGITWVDGMQDEYWGQGTQVTVSS

SEQ ID NO: 13073 - protein, 119 aa, synthetic construct
EVQLVESGGGLVQAGDSLRLSCTASGNIMMHGLMGWFRQAPGKEREFVAVYLGINGTYYADSVKGRFTISRDDARNTVYLQMNSLKPEDTAVYYCNVQPWGFDKNAEYWGQGTQVTVSS

SEQ ID NO: 13074 - protein, 119 aa, synthetic construct
EVQLVESGGGLVQAGDSLRLSCTASGNMEGVLEMGWFRQAPGKEREFVASISSVVMYTYYADSVKGRFTISRDDARNTVYLQMNSLKPEDTAVYYCNVVIYNLRFAEYWGQGTQVTVSS

SEQ ID NO: 13075 - protein, 120 aa, synthetic construct
EVQLVESGGGLVQAGDSLRLSCTASGIKESVVEMGWFRQAPGKEREFVASISYSSSYTYYADSVKGRFTISRDDARNTVYLQMNSLKPEDTAVYYCNVVAMDIRGKLEYWGQGTQVTVSS

SEQ ID NO: 13076 - protein, 122 aa, synthetic construct
EVQLVESGGGLVQAGDSLRLSCTASGILNVFGEMGWFRQAPGKEREFVASISIRGDYTYYADSVKGRFTISRDDARNTVYLQMNSLKPEDTAVYYCNVTLVVLSLGTKVEYWGQGTQVTVSS

SEQ ID NO: 13077 - protein, 121 aa, synthetic construct
EVQLVESGGGLVQAGDSLRLSCTASGMAEGMVEMGWFRQAPGKEREFVASISKHRSYTYYADSVKGRFTISRDDARNTVYLQMNSLKPEDTAVYYCNVVRLELGKAFVEYWGQGTQVTVSS

SEQ ID NO: 13078 - protein, 120 aa, synthetic construct
EVQLVESGGGLVQAGDSLRLSCTASGMTVNMIEMGWFRQAPGKEREFVASISVREMATYYADSVKGRFTISRDDARNTVYLQMNSLKPEDTAVYYCNVTRFAGKGFVEYWGQGTQVTVSS

SEQ ID NO: 13079 - protein, 122 aa, synthetic construct
EVQLVESGGGLVQAGDSLRLSCTASGMLAGAIEMGWFRQAPGNEREFVASISVAGSFTYYADSVKGRFTISRDDARNTVYLQMNSLKPEDTAVYYCNVCMLERSRLKFVEYWGQGTQVTVSS

SEQ ID NO: 13080 - protein, 125 aa, synthetic construct
EVQLVESGGGLVQAGDSLRLSCTASGTLGDRLEMGWFRQAPGKEREFVASISGSGLYTYYADSVKGRFTISRDDARNTVYLQMNSLKPEDTAVYYCNVVTIIHSSNGDIDIVEYWGQGTQVTVSS

SEQ ID NO: 13081 - protein, 120 aa, synthetic construct
EVQLVESGGGLVQAGDSLRLSCTASGFRDQLLEMGWFRQAPGKEREFVASISGNVSYTYYADSVKGRFTISRDDARNTVYLQMNSLKPEDTAVYYCNVTIVRRFDFQEYWGQGTQVTVSS

SEQ ID NO: 13082 - protein, 121 aa, synthetic construct
EVQLVESGGGLVQAGDSLRLSCTASGGSNVKIEMGWFRQAPGKEREFVASISMLHSYTYYADSVKGRFTISRDDARNTVYLQMNSLKPEDTAVYYCNVVAVVRGAGFSEYWGQGTQVTVSS

SEQ ID NO: 13083 - protein, 120 aa, synthetic construct
EVQLVESGGGLVQAGDSLRLSCTASGDFGQIIEMGWFRQAPGKEREFVASISAVHVYTYYADSVKGRFTISRDDARNTVYLQMNSLKPEDTAVYYCNVFGFAGRSMWEYWGQGTQVTVSS

SEQ ID NO: 13084 - protein, 120 aa, synthetic construct
EVQLVESGGGLVQAGDSLRLSCTASGVLVGGLEMGWFRQAPGKEREFVASISVFRGNTYYADSVKGRFTISRDDARNTVYLQMNSLKPEDTAVYYCNVTIFFAGLFCEYWGQGTQVTVSS

SEQ ID NO: 13085 - protein, 120 aa, synthetic construct
EVQLVESGGGLVQAGDSLRLSCTASGMEMGWFRQAPGKEREFVASISGVDAGTYYADSVKGRFTISRDDARNTVYLQMNSLKPEDTAVYYCNVTVFRIDSNLSSHFVEYWGQGTQVTVSS

SEQ ID NO: 13086 - protein, 119 aa, synthetic construct
EVQLVESGGGLVQAGDSLRLSCTASGWIGKMIEMGWFRQAPGKEREFVASISYGTGGTYYADSVKGRFTISRDDARNTVYLQMNSLKPEDTAVYYFQATKIAVNFQEYWGQGTQVTVSS

SEQ ID NO: 13087 - protein, 125 aa, synthetic construct
EVQLVESGGGLVQAGDSLRLSCTASGGRKDVVEMGWFRQAPGKEREFVASISGSDVYTYYADSVKGRFTISRDDARNTVYLQMNSLKPEDTAVYYCNVTDLRKQGASVFAFREYWGQGTQVTVSS

SEQ ID NO: 13088 - protein, 120 aa, synthetic construct
EVQLVESGGGLVQAGDSLRLSCTASGRNLRLVEMGWFRQAPGKEREFVASISIGNRYTYYADSVKGRFTISRDDARNTVYLQMNSLKPEDTAVYYCNVTSLDGHVFNEYWGQETQVTVSS

SEQ ID NO: 13089 - protein, 119 aa, synthetic construct
EVQLVESGGGLVQAGDSLRLSCTASGGDNTILEMGWFRQAPGKEREFVASISWRAVYTYYADSVKGRFTISRDDARNTVYLQMNSLKPEDTAVYYCNVVVVGERFREYWGQGTQVTVSS

SEQ ID NO: 13090 - protein, 117 aa, synthetic construct
EVQLVESGGGLVQAGDSLRLSCTASGHSERMLEMGWFRQAPGKEREFVASISGRVVYTYYADSVKGRFTISRDDARNTVYLQMNSLKPEDTAVYYCNVVNARIVEYWGQGTQVTVSS

SEQ ID NO: 13091 - protein, 121 aa, synthetic construct
EVQLVESGGGLVQAGDSLRLSCTASGMENLIIGMGWFRQAPGKEREFVASISVPRGGTYYADSVKGRFTISRDDARNTVYLQMNSLKPEDTAVYYCNVTAFHPSIYFCEYWGQGTQVTVSS

SEQ ID NO: 13092 - protein, 121 aa, synthetic construct
EVQLVESGGGLVQAGDSLRLSCTASGRVEGLIEMGWFRQAPGKEREFVASISWTGSYTYYADSAKGRFTISRDDARNTVYLQMNSLKPEDTAVYYCNVSTISRSVHLAEYWGQGTQVTVSS

SEQ ID NO: 13093 - protein, 120 aa, synthetic construct
EVQLVESGGGLVQAGDSLRLSCTASGMLGTLIDMGWFRQAPGKEREFVASISGMALYTYYADSVKGRFTISRDDARNTVYLQMNSLKPEDTAVYYCNVVYVHKSFFLEYWGQGTQVTVSS

SEQ ID NO: 13094 - protein, 119 aa, synthetic construct
EVQLVESGGGLVQAGDSLRLSCTASGKLAAAVEMGWFRQAPGKEREFVASISVRFSSTYYADSVKGRFTISRDDARNTVYLQMNSLKPEDTAVYYCNVTVVADGIYEYWGQGTQVTVSS

SEQ ID NO: 13095 - protein, 121 aa, synthetic construct
EVQLVESGGGLVQAGDSLRLSCTASGVRGLKLEMGWFRQAPGKEREFVASISHGMGTTYYADSVKGRFTISRDDARNTVYLQMNSLKPEDTAVYYCNVTVLHQRGRFGEYWGQGTQVTVSS

SEQ ID NO: 13096 - protein, 121 aa, synthetic construct
EVQLVESGGGLVQAGDSLRLSCTASGKWMHIMEMGWFRQAPGKEREFVASISGRYIYTYYADSVKGRFTISRDDARNTVYLQMNSLKPEDTAVYYCNVTILEGRAQFKEYWGQGTQVTVSS

SEQ ID NO: 13097 - protein, 124 aa, synthetic construct
EVQLVESGGGLVQAGDSLRLSCTASGVTNRLMEMGWFRQAPGKEREFVASISGEGVYTYYADSVKGRFTISRDDARNTVYLQMNSLKPEDTAVYYCNVTVFYSGSGKYYIREYWGQGTQVTVSS

SEQ ID NO: 13098 - protein, 120 aa, synthetic construct
EVQLVESGGGLVQAGDSLRLSCTASGKTGRSVIMGWFRQAPDKEREFVATITRGDDTTNYADSVKGRFTISRDDARNTVYLQMNSLKPEDTAVYYCAAVYFVNDCIVDYWGQGTQVTVSS

SEQ ID NO: 13099 - protein, 115 aa, synthetic construct
EVQLVESGGGLVQAGDSLRLSCTASGDSYILWRMGWFRQAPGKEREFVAAISLDGQFTNYADSVRGRFSISADSARNTVYLQMNSLKPEDTAVYYCAALPFLDYWGQGTQVTVSS

SEQ ID NO: 13100 - protein, 121 aa, synthetic construct
EVQLVESGGGLVQAGDSLRLSCTASGLYPIAMEMGWFRQAPGKEREFVASISGRGYWTYYADSVKGRFTISRDDARNTVYLQMNSLKPEDTAVYYCNVSVLESRLSKQEYWGQGTQVTVSS

SEQ ID NO: 13101 - protein, 123 aa, synthetic construct
EVQLVESGGGLVQAGDSLRLSCTASGTIGKVLEMGWFRQAPGKEREFVASISAISILTYYADSVKGRFTISRDDARNTVYLQMNSLKPEDTAVYYCNVTSLFVGVRYRFVEYWGQGTQVTVSS

SEQ ID NO: 13102 - protein, 26 aa, synthetic construct
EVQLVESGGGLVQAGDSLRLSCTASG

SEQ ID NO: 13103 - protein, 19 aa, synthetic construct
MGWFRQAPGKEREFVAAIS

SEQ ID NO: 13104 - protein, 41 aa, synthetic construct
AFYADSVRGRFSISADSAKNTVYLQMNSLKPEDTAVYYCAA

SEQ ID NO: 13105 - protein, 13 aa, synthetic construct
DYWGQGTQVTVSS
